(19) United States
(12) Patent Application Publication
(10) Pub. No.: US 2002/0182191 A1
(43) Pub. Date: Dec. 5, 2002

(54) Compounds for immunotherapy and diagnosis of colon cancer and methods for their use

(75) Inventors: Jiangchun Xu, Bellevue, WA (US); Michael J. Lodes, Seattle, WA (US); Heather Secrist, Seattle, WA (US); Darin R. Benson, Seattle, WA (US); Madeleine Joy Meagher, Seattle, WA (US); John A. Stolk, Bothell, WA (US); Tongtong Wang, Medina, WA (US); Yuqiu Jiang, Kent, WA (US); Carole L. Smith, Seattle, WA (US); Gordon E. King, Shoreline, WA (US); Aijun Wang, Issaquah, WA (US); Jonathan D. Clapper, Seattle, WA (US); Yasir A.W. Skeiky, Bellevue, WA (US); Gary R. Fanger, Mill Creek, WA (US); Thomas S. Vedvick, Federal Way, WA (US); Darrick Carter, Seattle, WA (US)

Correspondence Address: SEED INTELLECTUAL PROPERTY LAW GROUP PLLC, 701 FIFTH AVE, SUITE 6300, SEATTLE, WA, 98104-7092, US

(73) Assignee: Corixa Corporation, Seattle, WA (US)

(21) Appl. No.: 10/025,380

(22) Filed: Dec. 19, 2001

Related U.S. Application Data
(63) Continuation-in-part of application No. 09/922,217, filed on Aug. 3, 2001.
Application No. 09/922,217 is a continuation-in-part of application No. 09/833,263, filed on Apr. 10, 2001.
Application No. 09/833,263 is a continuation-in-part of application No. 09/649,811, filed on Aug. 28, 2000.
Application No. 09/649,811 is a continuation-in-part of application No. 09/609,448, filed on Jun. 29, 2000.
Application No. 09/609,448 is a continuation-in-part of application No. 09/575,251, filed on May 19, 2000, now abandoned.
Application No. 09/575,251 is a continuation-in-part of application No. 09/519,444, filed on Mar. 6, 2000, now abandoned.
Application No. 09/519,444 is a continuation-in-part of application No. 09/504,629, filed on Feb. 15, 2000, now abandoned.
Application No. 09/504,629 is a continuation-in-part of application No. 09/480,321, filed on Jan. 10, 2000, now abandoned.
Application No. 09/480,321 is a continuation-in-part of application No. 09/476,296, filed on Dec. 30, 1999, now abandoned.
Application No. 09/476,296 is a continuation-in-part of application No. 09/454,150, filed on Dec. 2, 1999, now abandoned.
Application No. 09/454,150 is a continuation-in-part of application No. 09/444,252, filed on Nov. 19, 1999.
Application No. 09/444,252 is a continuation-in-part of application No. 09/401,064, filed on Sep. 22, 1999.
Application No. 09/401,064 is a continuation-in-part of application No. 09/347,496, filed on Jul. 2, 1999.
Application No. 09/347,496 is a continuation-in-part of application No. 09/221,298, filed on Dec. 23, 1998, now Pat. No. 6,284,241.

(30) Foreign Application Priority Data
Dec. 23, 1999 (WO) PCT/US99/30909

(51) Int. Cl. A61K 48/00; C12Q 1/68; C07H 21/04; C12N 9/00; A61K 39/00

(52) U.S. Cl. 424/93.21; 424/185.1; 536/23.2; 435/6; 435/69.1; 435/320.1; 435/325; 435/183

(57) ABSTRACT

Compositions and methods for the therapy and diagnosis of cancer, such as colon cancer, are disclosed. Compositions may comprise one or more colon tumor proteins, immunogenic portions thereof, or polynucleotides that encode such portions. Alternatively, a therapeutic composition may comprise an antigen presenting cell that expresses a colon tumor protein, or a T cell that is specific for cells expressing such a protein. Such compositions may be used, for example, for the prevention and treatment of diseases such as colon cancer. Diagnostic methods based on detecting a colon tumor protein, or mRNA encoding such a protein, in a sample are also provided.

### BACKGROUND OF THE INVENTION

[0001] 1. Field of the Invention

[0002] The present invention relates generally to therapy and diagnosis of cancer, such as colon cancer. The invention is more specifically related to polypeptides comprising at least a portion of a colon tumor protein, and to polynucleotides encoding such polypeptides. Such polypeptides and polynucleotides may be used in vaccines and pharmaceutical compositions for prevention and treatment of colon cancer, and for the diagnosis and monitoring of such cancers.

[0003] 2. Description of the Related Art

[0004] Cancer is a significant health problem throughout the world. Although advances have been made in detection and therapy of cancer, no vaccine or other universally successful method for prevention or treatment is currently available. Current therapies, which are generally based on a combination of chemotherapy or surgery and radiation, continue to prove inadequate in many patients.

[0005] Colon cancer is the second most frequently diagnosed malignancy in the United States as well as the second most common cause of cancer death. The five-year survival rate for patients with colorectal cancer detected in an early localized stage is 92%; unfortunately, only 37% of colorectal cancer is diagnosed at this stage. The survival rate drops to 64% if the cancer is allowed to spread to adjacent organs or lymph nodes, and to 7% in patients with distant metastases.

[0006] The prognosis of colon cancer is directly related to the degree of penetration of the tumor through the bowel wall and the presence or absence of nodal involvement, consequently, early detection and treatment are especially important. Currently, diagnosis is aided by the use of screening assays for fecal occult blood, sigmoidoscopy, colonoscopy and double contrast barium enemas. Treatment regimens are determined by the type and stage of the cancer, and include surgery, radiation therapy and/or chemotherapy. Recurrence following surgery (the most common form of therapy) is a major problem and is often the ultimate cause of death. In spite of considerable research into therapies for the disease, colon cancer remains difficult to diagnose and treat. In spite of considerable research into therapies for these and other cancers, colon cancer remains difficult to diagnose and treat effectively. Accordingly, there is a need in the art for improved methods for detecting and treating such cancers. The present invention fulfills these needs and further provides other related advantages.

### BRIEF SUMMARY OF THE INVENTION

[0007] In one aspect, the present invention provides polynucleotide compositions comprising a sequence selected from the group consisting of:

[0008] (a) sequences provided in SEQ ID NOs:1-121, 123-197, 205-630, 632-684, 686, 690-691, 694-1058, 1069, 1071-1076, 1082, 1084, 1086, 1092, 1094, 1096-1101, 1103-1106, 1111-1114, 1119, 1120, and 1125,

[0009] (b) complements of the sequences provided in SEQ ID NOs:1-121, 123-197, 205-630, 632-684, 686, 690-691, 694-1058, 1069, 1071-1076, 1082, 1084, 1086, 1092, 1094, 1096-1101, 1103-1106, 1111-1114, 1119, 1120, and 1125;

[0010] (c) sequences consisting of at least 20 contiguous residues of a sequence provided in SEQ ID NOs:1-121, 123-197, 205-630, 632-684, 686, 690-691, 694-1058, 1069, 1071-1076, 1082, 1084, 1086, 1092, 1094, 1096-1101, 1103-1106, 1111-1114, 1119, 1120, and 1125;

[0011] (d) sequences that hybridize to a sequence provided in SEQ ID NOs:1-121, 123-197, 205-630, 632-684, 686, 690-691, 694-1058, 1069, 1071-1076, 1082, 1084, 1086, 1092, 1094, 1096-1101, 1103-1106, 1111-1114, 1119, 1120, and 1125, under moderately stringent conditions;

[0012] (e) sequences having at least 75% identity to a sequence of SEQ ID NOs:1-121, 123-197, 205-630, 632-684, 686, 690-691, 694-1058, 1069, 1071-1076, 1082, 1084, 1086, 1092, 1094, 1096-1101, 1103-1106, 1111-1114, 1119, 1120, and 1125;

[0013] (f) sequences having at least 90% identity to a sequence of SEQ ID NOs:1-121, 123-197, 205-630, 632-684, 686, 690-691, 694-1058, 1069, 1071-1076, 1082, 1084, 1086, 1092, 1094, 1096-1101, 1103-1106, 1111-1114, 1119, 1120, and 1125, and

[0014] (g) degenerate variants of a sequence provided in SEQ ID NOs:1-121, 123-197, 205-630, 632-684, 686, 690-691, 694-1058, 1069, 1071-1076, 1082, 1084, 1086, 1092, 1094, 1096-1101, 1103-1106, 1111-1114, 1119, 1120, and 1125,

[0015] In one preferred embodiment, the polynucleotide compositions of the invention are expressed in at least about 20%, more preferably in at least about 30%, and most preferably in at least about 50% of colon tumors samples tested, at a level that is at least about 2-fold, preferably at least about 5-fold, and most preferably at least about 10-fold higher than that for normal tissues.

[0016] The present invention, in another aspect, provides polypeptide compositions comprising an amino acid sequence that is encoded by a polynucleotide sequence described above.

[0017] The present invention further provides polypeptide compositions comprising an amino acid sequence selected from the group consisting of sequences recited in SEQ ID NOs:122, 198-204, 631, 685, 687, 692, 693, 1059-1068, 1070, 1077-1081, 1083, 1085, 1087, 1093, 1095, 1102, 1107-1110, 1115-1118, 1121, 1122, and 1126-1129.

[0018] In certain preferred embodiments, the polypeptides and/or polynucleotides of the present invention are immunogenic, i.e., they are capable of eliciting an immune response, particularly a humoral and/or cellular immune response, as further described herein.

[0019] The present invention further provides fragments, variants and/or derivatives of the disclosed polypeptide and/or polynucleotide sequences, wherein the fragments, variants and/or derivatives preferably have a level of immunogenic activity of at least about 50%, preferably at least about 70% and more preferably at least about 90% of the level of immunogenic activity of a polypeptide sequence set forth in SEQ ID NOs:122, 198-204, 631, 685, 687, 692, 693, 1059-1068, 1070, 1077-1081, 1083, 1085, 1087, 1093, 1095, 1102, 1107-1110, 1115-1118, 1121, 1122, and 1126-1129 or a polypeptide sequence encoded by a polynucleotide sequence set forth in SEQ ID NOs:1-121, 123-197, 205-630, 632-684, 686, 690-691, 694-1058, 1069, 1071-1076, 1082, 1084, 1086, 1092, 1094, 1096-1101, 1103-1106, 1111-1114, 1119, 1120, and 1125.

[0020] The present invention further provides polynucleotides that encode a polypeptide described above, expression vectors comprising such polynucleotides and host cells transformed or transfected with such expression vectors.

[0021] Within other aspects, the present invention provides pharmaceutical compositions comprising a polypeptide or polynucleotide as described above and a physiologically acceptable carrier.

[0022] Within a related aspect of the present invention, the pharmaceutical compositions, e.g., vaccine compositions, are provided for prophylactic or therapeutic applications. Such compositions generally comprise an immunogenic polypeptide or polynucleotide of the invention and an immunostimulant, such as an adjuvant.

[0023] The present invention further provides pharmaceutical compositions that comprise: (a) an antibody or antigen-binding fragment thereof that specifically binds to a polypeptide of the present invention, or a fragment thereof, and (b) a physiologically acceptable carrier.

[0024] Within further aspects, the present invention provides pharmaceutical compositions comprising: (a) an antigen presenting cell that expresses a polypeptide as described above and (b) a pharmaceutically acceptable carrier or excipient. Illustrative antigen presenting cells include dendritic cells, macrophages, monocytes, fibroblasts and B cells.

[0025] Within related aspects, pharmaceutical compositions are provided that comprise: (a) an antigen presenting cell that expresses a polypeptide as described above and (b) an immunostimulant.

[0026] The present invention further provides, in other aspects, fusion proteins that comprise at least one polypeptide as described above, as well as polynucleotides encoding such fusion proteins, typically in the form of pharmaceutical compositions, e.g., vaccine compositions, comprising a physiologically acceptable carrier and/or an immunostimulant. The fusions proteins may comprise multiple immunogenic polypeptides or portions/variants thereof, as described herein, and may further comprise one or more polypeptide segments for facilitating the expression, purification and/or immunogenicity of the polypeptide(s).

[0027] Within further aspects, the present invention provides methods for stimulating an immune response in a patient, preferably a T cell response in a human patient, comprising administering a pharmaceutical composition described herein. The patient may be afflicted with colon cancer, in which case the methods provide treatment for the disease, or patient considered at risk for such a disease may be treated prophylactically.

[0028] Within further aspects, the present invention provides methods for inhibiting the development of a cancer in a patient, comprising administering to a patient a pharmaceutical composition as recited above. The patient may be afflicted with colon cancer, in which case the methods provide treatment for the disease, or patient considered at risk for such a disease may be treated prophylactically.

[0029] The present invention further provides, within other aspects, methods for removing tumor cells from a biological sample, comprising contacting a biological sample with T cells that specifically react with a polypeptide of the present invention, wherein the step of contacting is performed under conditions and for a time sufficient to permit the removal of cells expressing the protein from the sample.

[0030] Within related aspects, methods are provided for inhibiting the development of a cancer in a patient, comprising administering to a patient a biological sample treated as described above.

[0031] Methods are further provided, within other aspects, for stimulating and/or expanding T cells specific for a polypeptide of the present invention, comprising contacting T cells with one or more of: (i) a polypeptide as described above; (ii) a polynucleotide encoding such a polypeptide; and/or (iii) an antigen presenting cell that expresses such a polypeptide; under conditions and for a time sufficient to permit the stimulation and/or expansion of T cells. Isolated T cell populations comprising T cells prepared as described above are also provided.

[0032] Within further aspects, the present invention provides methods for inhibiting the development of a cancer in a patient, comprising administering to a patient an effective amount of a T cell population as described above.

[0033] The present invention further provides methods for inhibiting the development of a cancer in a patient, comprising the steps of: (a) incubating CD4⁺ and/or CD8⁺ T cells isolated from a patient with one or more of: (i) a polypeptide comprising at least an immunogenic portion of polypeptide disclosed herein; (ii) a polynucleotide encoding such a polypeptide; and (iii) an antigen-presenting cell that expressed such a polypeptide; and (b) administering to the patient an effective amount of the proliferated T cells, and thereby inhibiting the development of a cancer in the patient. Proliferated cells may, but need not, be cloned prior to administration to the patient.

[0034] Within further aspects, the present invention provides methods for determining the presence or absence of a cancer, preferably a colon cancer, in a patient comprising: (a) contacting a biological sample obtained from a patient with a binding agent that binds to a polypeptide as recited above; (b) detecting in the sample an amount of polypeptide that binds to the binding agent; and (c) comparing the amount of polypeptide with a predetermined cut-off value, and therefrom determining the presence or absence of a cancer in the patient. Within preferred embodiments, the binding agent is an antibody, more preferably a monoclonal antibody.

[0035] The present invention also provides, within other aspects, methods for monitoring the progression of a cancer in a patient. Such methods comprise the steps of: (a) contacting a biological sample obtained from a patient at a first point in time with a binding agent that binds to a polypeptide as recited above; (b) detecting in the sample an amount of polypeptide that binds to the binding agent; (c) repeating steps (a) and (b) using a biological sample obtained from the patient at a subsequent point in time; and (d) comparing the amount of polypeptide detected in step (c) with the amount detected in step (b) and therefrom monitoring the progression of the cancer in the patient.

[0036] The present invention further provides, within other aspects, methods for determining the presence or absence of a cancer in a patient, comprising the steps of: (a) contacting a biological sample obtained from a patient with an oligonucleotide that hybridizes to a polynucleotide that encodes a polypeptide of the present invention; (b) detecting in the sample a level of a polynucleotide, preferably mRNA, that hybridizes to the oligonucleotide; and (c) comparing the level of polynucleotide that hybridizes to the oligonucleotide with a predetermined cut-off value, and therefrom determining the presence or absence of a cancer in the patient. Within certain embodiments, the amount of mRNA is detected via polymerase chain reaction using, for example, at least one oligonucleotide primer that hybridizes to a polynucleotide encoding a polypeptide as recited above, or a complement of such a polynucleotide. Within other embodiments, the amount of mRNA is detected using a hybridization technique, employing an oligonucleotide probe that hybridizes to a polynucleotide that encodes a polypeptide as recited above, or a complement of such a polynucleotide.

[0037] In related aspects, methods are provided for monitoring the progression of a cancer in a patient, comprising the steps of: (a) contacting a biological sample obtained from a patient with an oligonucleotide that hybridizes to a polynucleotide that encodes a polypeptide of the present invention; (b) detecting in the sample an amount of a polynucleotide that hybridizes to the oligonucleotide; (c) repeating steps (a) and (b) using a biological sample obtained from the patient at a subsequent point in time; and (d) comparing the amount of polynucleotide detected in step (c) with the amount detected in step (b) and therefrom monitoring the progression of the cancer in the patient.

[0038] Within further aspects, the present invention provides antibodies, such as monoclonal antibodies, that bind to a polypeptide as described above, as well as diagnostic kits comprising such antibodies. Diagnostic kits comprising one or more oligonucleotide probes or primers as described above are also provided.

[0039] These and other aspects of the present invention will become apparent upon reference to the following detailed description. All references disclosed herein are hereby incorporated by reference in their entirety as if each was incorporated individually.

### BRIEF DESCRIPTION OF THE SEQUENCE IDENTIFIERS

[0040] SEQ ID NO: 1 is a first determined cDNA sequence for Contig 1, showing homology to Neutrophil Gelatinase Associated Lipocalin.

[0041] SEQ ID NO: 2 is the determined cDNA sequence for Contig 2, showing no significant homology to any known genes.

[0042] SEQ ID NO: 3 is the determined cDNA sequence for Contig 4, showing homology to Carcinoembryonic antigen.

[0043] SEQ ID NO: 4 is the determined cDNA sequence for Contig 5, showing homology to Carcinoembryonic antigen.

[0044] SEQ ID NO: 5 is the determined cDNA sequence for Contig 9, showing homology to Carcinoembryonic antigen.

[0045] SEQ ID NO: 6 is the determined cDNA sequence for Contig 52, showing homology to Carcinoembryonic antigen.

[0046] SEQ ID NO: 7 is the determined cDNA sequence for Contig 6, showing homology to Villin.

[0047] SEQ ID NO: 8 is the determined cDNA sequence for Contig 8, showing no significant homology to any known genes.

[0048] SEQ ID NO: 9 is the determined cDNA sequence for Contig 10, showing homology to Transforming Growth Factor (BIGH3).

[0049] SEQ ID NO: 10 is the determined cDNA sequence for Contig 19, showing homology to Transforming Growth Factor (BIGH3).

[0050] SEQ ID NO: 11 is the determined cDNA sequence for Contig 21, showing homology to Transforming Growth Factor (BIGH3).

[0051] SEQ ID NO: 12 is the determined cDNA sequence for Contig 11, showing homology to CO-029.

[0052] SEQ ID NO: 13 is the determined cDNA sequence for Contig 55, showing homology to CO-029.

[0053] SEQ ID NO: 14 is the determined cDNA sequence for Contig 12, showing homology to Chromosome 17, clone hRPC.1171_I_{—}10, also referred to as C798P.

[0054] SEQ ID NO: 15 is the determined cDNA sequence for Contig 13, showing no significant homology to any known gene.

[0055] SEQ ID NO: 16 is the determined cDNA sequence for Contig 14, also referred to as 14261, showing no significant homology to any known gene.

[0056] SEQ ID NO: 17 is the determined cDNA sequence for Contig 15, showing homology to Ets-Related Transcription Factor (ERT).

[0057] SEQ ID NO: 18 is the determined cDNA sequence for Contig 16, showing homology to Chromosome 5, PAC clone 228g9 (LBNL H142).

[0058] SEQ ID NO: 19 is the determined cDNA sequence for Contig 24, showing homology to Chromosome 5, PAC clone 228g9 (LBNL H142).

[0059] SEQ ID NO: 20 is the determined cDNA sequence for Contig 17, showing homology to Cytokeratin.

[0060] SEQ ID NO: 21 is the determined cDNA sequence for Contig 18, showing homology to L1-Cadherin.

[0061] SEQ ID NO: 22 is the determined cDNA sequence for Contig 20, showing no significant homology to any known gene.

[0062] SEQ ID NO: 23 is the determined cDNA sequence for Contig 22, showing homology to Bumetanide-sensitive Na-K-Cl cotransporter (NKCCl).

[0063] SEQ ID NO: 24 is the determined cDNA sequence for Contig 23, showing no significant homology to any known gene.

[0064] SEQ ID NO: 25 is the determined cDNA sequence for Contig 25, showing homology to Macrophage Inflammatory Protein 3 alpha.

[0065] SEQ ID NO: 26 is the determined cDNA sequence for Contig 26, showing homology to Laminin.

[0066] SEQ ID NO: 27 is the determined cDNA sequence for Contig 48, showing homology to Laminin.

[0067] SEQ ID NO: 28 is the determined cDNA sequence for Contig 27, showing homology to Mytobularin (MTM1).

[0068] SEQ ID NO: 29 is the determined cDNA sequence for Contig 28, showing homology to Chromosome 16 BAC clone CIT987SK-A-363E6.

[0069] SEQ ID NO: 30 is the determined cDNA sequence for Contig 29, also referred to as C751P and 14247, showing no significant homology to any known gene, but partial homology to Rat GSK-3p-interacting protein Axil homolog.

[0070] SEQ ID NO: 31 is the determined cDNA sequence for Contig 30, showing homology to Zinc Finger Transcription Factor (ZNF207).

[0071] SEQ ID NO: 32 is the determined cDNA sequence for Contig 31, showing no significant homology to any known gene, but partial homology to Mus musculus GOB-4 homolog.

[0072] SEQ ID NO: 33 is the determined cDNA sequence for Contig 35, showing no significant homology to any known gene, but partial homology to Mus musculus GOB-4 homolog.

[0073] SEQ ID NO: 34 is the determined cDNA sequence for Contig 32, showing no significant homology to any known gene.

[0074] SEQ ID NO: 35 is the determined cDNA sequence for Contig 34, showing homology to Desmoglein 2.

[0075] SEQ ID NO: 36 is the determined cDNA sequence for Contig 36, showing no significant homology to any known gene.

[0076] SEQ ID NO: 37 is the determined cDNA sequence for Contig 37, showing homology to Putative Transmembrane Protein.

[0077] SEQ ID NO: 38 is the determined cDNA sequence for Contig 38, also referred to as C796P and 14219, showing no significant homology to any known gene.

[0078] SEQ ID NO: 39 is the determined cDNA sequence for Contig 40, showing homology to Nonspecific Cross-reacting Antigen.

[0079] SEQ ID NO: 40 is the determined cDNA sequence for Contig 41, also referred to as C799P and 14308, showing no significant homology to any known gene.

[0080] SEQ ID NO: 41 is the determined cDNA sequence for Contig 42, also referred to as C794P and 14309, showing no significant homology to any known gene.

[0081] SEQ ID NO: 42 is the determined cDNA sequence for Contig 43, showing homology to Chromosome 1 specific transcript KIAA0487.

[0082] SEQ ID NO: 43 is the determined cDNA sequence for Contig 45, showing homology to hMCM2.

[0083] SEQ ID NO: 44 is the determined cDNA sequence for Contig 46, showing homology to ETS2.

[0084] SEQ ID NO: 45 is the determined cDNA sequence for Contig 49, showing homology to Pump-1.

[0085] SEQ ID NO: 46 is the determined cDNA sequence for Contig 50, also referred to as C792P and 18323, showing no significant homology to any known gene.

[0086] SEQ ID NO: 47 is the determined cDNA sequence for Contig 51, also referred to as C795P and 14317, showing no significant homology to any known gene.

[0087] SEQ ID NO: 48 is the determined cDNA sequence for 11092, showing no significant homology to any known gene.

[0088] SEQ ID NO: 49 is the determined cDNA sequence for 11093, showing no significant homology to any known gene.

[0089] SEQ ID NO: 50 is the determined cDNA sequence for 11094, showing homology Human Putative Enterocyte Differentiation Protein.

[0090] SEQ ID NO: 51 is the determined cDNA sequence for 11095, showing homology to Human Transcriptional Corepressor hKAP1/TIF1B mRNA.

[0091] SEQ ID NO: 52 is the determined cDNA sequence for 11096, showing no significant homology to any known gene.

[0092] SEQ ID NO: 53 is the determined cDNA sequence for 11097, showing homology to Human Nonspecific Antigen.

[0093] SEQ ID NO: 54 is the determined cDNA sequence for 11098, showing no significant homology to any known gene.

[0094] SEQ ID NO: 55 is the determined cDNA sequence for 11099, showing homology to Human Pancreatic Secretory Inhibitor (PST) mRNA.

[0095] SEQ ID NO: 56 is the determined cDNA sequence for 11186, showing homology to Human Pancreatic Secretory Inhibitor (PST) mRNA.

[0096] SEQ ID NO: 57 is the determined cDNA sequence for 11101, showing homology to Human Chromosome X.

[0097] SEQ ID NO: 58 is the determined cDNA sequence for 11102, showing homology to Human Chromosome X.

[0098] SEQ ID NO: 59 is the determined cDNA sequence for 11103, showing no significant homology to any known gene.

[0099] SEQ ID NO: 60 is the determined cDNA sequence for 11174, showing no significant homology to any known gene.

[0100] SEQ ID NO: 61 is the determined cDNA sequence for 11104, showing homology to Human mRNA for KIAA0154.

[0101] SEQ ID NO: 62 is the determined cDNA sequence for 11105, showing homology toHuman Apurinic/Apyrimidinic Endonuclease (hap 1)mRNA.

[0102] SEQ ID NO: 63 is the determined cDNA sequence for 11106, showing homology toHuman Chromosome 12p 13.

[0103] SEQ ID NO: 64 is the determined cDNA sequence for 11107, showing homology to Human 90 kDa Heat Shock Protein.

[0104] SEQ ID NO: 65 is the determined cDNA sequence for 11108, showing no significant homology to any known gene.

[0105] SEQ ID NO: 66 is the determined cDNA sequence for 11112, showing no significant homology to any known gene.

[0106] SEQ ID NO: 67 is the determined cDNA sequence for 11115, showing no significant homology to any known gene.

[0107] SEQ ID NO: 68 is the determined cDNA sequence for 11117, showing no significant homology to any known gene.

[0108] SEQ ID NO: 69 is the determined cDNA sequence for 11118, showing no significant homology to any known gene.

[0109] SEQ ID NO: 70 is the determined cDNA sequence for 11119, showing homology to Human Elongation Factor 1-alpha.

[0110] SEQ ID NO: 71 is the determined cDNA sequence for 11121, showing homology to Human Lamin B Receptor (LBR) mRNA.

[0111] SEQ ID NO: 72 is the determined cDNA sequence for 11122, showing homology to H. sapiens mRNA for Novel Glucocorticoid.

[0112] SEQ ID NO: 73 is the determined cDNA sequence for 11123, showing homology to H. sapiens mRNA for snRNP protein B.

[0113] SEQ ID NO: 74 is the determined cDNA sequence for 11124, showing homology to Human Cisplatin Resistance Associated Beta-protein.

[0114] SEQ ID NO: 75 is the determined cDNA sequence for 11127, showing homology to M. musculus Calumenin mRNA.

[0115] SEQ ID NO: 76 is the determined cDNA sequence for 11128, showing homology to Human ras-related small GTP binding protein.

[0116] SEQ ID NO: 77 is the determined cDNA sequence for 11130, showing homology to Human Cosmid U 169d2.

[0117] SEQ ID NO: 78 is the determined cDNA sequence for 11131, showing homology to H. sapiens mRNA for protein homologous to Elongation 1-g.

[0118] SEQ ID NO: 79 is the determined cDNA sequence for 11134, showing no significant homology to any known gene.

[0119] SEQ ID NO: 80 is the determined cDNA sequence for 11135, showing homology to H. sapiens Nieman-Pick (NPCI) mRNA.

[0120] SEQ ID NO: 81 is the determined cDNA sequence for 11137, showing homology to H. sapiens mRNA for Niecin b-chain.

[0121] SEQ ID NO: 82 is the determined cDNA sequence for 11138, showing homology to Human Endogenous Retroviral Protease mRNA.

[0122] SEQ ID NO: 83 is the determined cDNA sequence for 11139, showing homology to H. sapiens mRNA for DMBT1 protein.

[0123] SEQ ID NO: 84 is the determined cDNA sequence for 11140, showing homology to H. sapiens ras GTPase activating-like protein.

[0124] SEQ ID NO: 85 is the determined cDNA sequence for 11143, showing homology to Human Acidic Ribosomal Phosphoprotein PO mRNA.

[0125] SEQ ID NO: 86 is the determined cDNA sequence for 11144, showing homology to H. sapiens U21 mRNA.

[0126] SEQ ID NO: 87 is the determined cDNA sequence for 11145, showing homology to Human GTP-binding protein.

[0127] SEQ ID NO: 88 is the determined cDNA sequence for 11148, showing homology to H. sapiens U21 mRNA.

[0128] SEQ ID NO: 89 is the determined cDNA sequence for 11151, showing no significant homology to any known gene.

[0129] SEQ ID NO: 90 is the determined cDNA sequence for 11154, showing no significant homology to any known gene.

[0130] SEQ ID NO: 91 is the determined cDNA sequence for 11156, showing homology to H. sapiens Ribosomal Protein L27.

[0131] SEQ ID NO: 92 is the determined cDNA sequence for 11157, showing homology to H. sapiens Ribosomal Protein L27.

[0132] SEQ ID NO: 93 is the determined cDNA sequence for 11158, showing no significant homology to any known gene.

[0133] SEQ ID NO: 94 is the determined cDNA sequence for 11162, showing homology to Ag-X antigen.

[0134] SEQ ID NO: 95 is the determined cDNA sequence for 11164, showing homology to H. sapiens mRNA for Signal Recognition Protein sub14.

[0135] SEQ ID NO: 96 is the determined cDNA sequence for 11165, showing homology to Human PAC 204e5/127h14.

[0136] SEQ ID NO: 97 is the determined cDNA sequence for 11166, showing homology to Human mRNA for KIAA0108.

[0137] SEQ ID NO: 98 is the determined cDNA sequence for 11167, showing homology to H. sapiens mRNA for Neutrophil Gelatinase asset. Lipocalin.

[0138] SEQ ID NO: 99 is the determined cDNA sequence for 11168, showing no significant homology to any known gene.

[0139] SEQ ID NO: 100 is the determined cDNA sequence for 11172, showing no significant homology to any known gene.

[0140] SEQ ID NO: 101 is the determined cDNA sequence for 11175, showing no significant homology to any known gene.

[0141] SEQ ID NO: 102 is the determined cDNA sequence for 11176, showing homology to Human maspin mRNA.

[0142] SEQ ID NO: 103 is the determined cDNA sequence for 11177, showing homology to Human Carcinoembryonic Antigen.

[0143] SEQ ID NO: 104 is the determined cDNA sequence for 11178, showing homology to Human A-Tubulin mRNA.

[0144] SEQ ID NO: 105 is the determined cDNA sequence for 11179, showing homology to Human mRNA for proton-ATPase-like protein.

[0145] SEQ ID NO: 106 is the determined cDNA sequence for 11180, showing homology to Human HepG23′ region cDNA clone hmd.

[0146] SEQ ID NO: 107 is the determined cDNA sequence for 11182, showing homology to Human MHC homologous to Chicken B-Complex Protein.

[0147] SEQ ID NO: 108 is the determined cDNA sequence for 11183, showing homology to Human High Mobility Group Box (SSRP1) mRNA.

[0148] SEQ ID NO: 109 is the determined cDNA sequence for 11184, showing no significant homology to any known gene.

[0149] SEQ ID NO: 110 is the determined cDNA sequence for 11185, showing no significant homology to any known gene.

[0150] SEQ ID NO: 111 is the determined cDNA sequence for 11187, showing no significant homology to any known gene.

[0151] SEQ ID NO: 112 is the determined cDNA sequence for 11190, showing homology to Human Replication Protein A 70 kDa.

[0152] SEQ ID NO: 113 is the determined cDNA sequence for Contig 47, also referred to as C797P, showing homology to Human Chromosome X clone bWXD342.

[0153] SEQ ID NO: 114 is the determined cDNA sequence for Contig 7, showing homology to Equilibrative Nucleoside Transporter 2 (ent2).

[0154] SEQ ID NO: 115 is the determined cDNA sequence for 14235.1, also referred to as C791P, showing homology to H. sapiens chromosome 21 derived BAC containing ets-2 gene.

[0155] SEQ ID NO: 116 is the determined cDNA sequence for 14287.2, showing no significant homology to any known gene, but some degree of homology to Putative Transmembrane Protein.

[0156] SEQ ID NO: 117 is the determined cDNA sequence for 14233.1, also referred to as Contig 48, showing no significant homology to any known gene.

[0157] SEQ ID NO: 118 is the determined cDNA sequence for 14298.2, also referred to as C793P, showing no significant homology to any known gene.

[0158] SEQ ID NO: 119 is the determined cDNA sequence for 14372, also referred to as Contig 44, showing no significant homology to any known gene.

[0159] SEQ ID NO: 120 is the determined cDNA sequence for 14295, showing homology to secreted cement gland protein XAG-2 homolog.

[0160] SEQ ID NO: 121 is the determined full-length cDNA sequence for a clone showing homology to Beta IG-H3.

[0161] SEQ ID NO: 122 is the predicted amino acid sequence for the clone of SEQ ID NO: 121.

[0162] SEQ ID NO: 123 is a longer determined cDNA sequence for C751P.

[0163] SEQ ID NO: 124 is a longer determined cDNA sequence for C791P.

[0164] SEQ ID NO: 125 is a longer determined cDNA sequence for C792P.

[0165] SEQ ID NO: 126 is a longer determined cDNA sequence for C793P.

[0166] SEQ ID NO: 127 is a longer determined cDNA sequence for C794P.

[0167] SEQ ID NO: 128 is a longer determined cDNA sequence for C795P.

[0168] SEQ ID NO: 129 is a longer determined cDNA sequence for C796P.

[0169] SEQ ID NO: 130 is a longer determined cDNA sequence for C797P.

[0170] SEQ ID NO: 131 is a longer determined cDNA sequence for C798P.

[0171] SEQ ID NO: 132 is a longer determined cDNA sequence for C799P.

[0172] SEQ ID NO: 133 is a first partial determined cDNA sequence for CoSub-3 (also known as 23569).

[0173] SEQ ID NO: 134 is a second partial determined cDNA sequence for CoSub-3 (also known as 23569).

[0174] SEQ ID NO: 135 is a first partial determined cDNA sequence for CoSub-13 (also known as 23579).

[0175] SEQ ID NO: 136 is a second partial determined cDNA sequence for CoSub-13 (also known as 23579).

[0176] SEQ ID NO: 137 is the determined cDNA sequence for CoSub-17 (also known as 23583).

[0177] SEQ ID NO: 138 is the determined cDNA sequence for CoSub-19 (also known as 23585).

[0178] SEQ ID NO: 139 is the determined cDNA sequence for CoSub-22 (also known as 23714).

[0179] SEQ ID NO: 140 is the determined cDNA sequence for CoSub-23 (also known as 23715).

[0180] SEQ ID NO: 141 is the determined cDNA sequence for CoSub-26 (also known as 23717).

[0181] SEQ ID NO: 142 is the determined cDNA sequence for CoSub-33 (also known as 23724).

[0182] SEQ ID NO: 143 is the determined cDNA sequence for CoSub-34 (also known as 23725).

[0183] SEQ ID NO: 144 is the determined cDNA sequence for CoSub-35 (also known as 23726).

[0184] SEQ ID NO: 145 is the determined cDNA sequence for CoSub-37 (also known as 23728).

[0185] SEQ ID NO: 146 is the determined cDNA sequence for CoSub-39 (also known as 23730).

[0186] SEQ ID NO: 147 is the determined cDNA sequence for CoSub-42 (also known as 23766).

[0187] SEQ ID NO: 148 is the determined cDNA sequence for CoSub-44 (also known as 23768).

[0188] SEQ ID NO: 149 is the determined cDNA sequence for CoSub-47 (also known as 23771).

[0189] SEQ ID NO: 150 is the determined cDNA sequence for CoSub-54 (also known as 23778).

[0190] SEQ ID NO: 151 is the determined cDNA sequence for CoSub-55 (also known as 23779).

[0191] SEQ ID NO: 152 is the determined cDNA sequence for CT1 (also known as 24099).

[0192] SEQ ID NO: 153 is the determined cDNA sequence for CT2 (also known as 24100).

[0193] SEQ ID NO: 154 is the determined cDNA sequence for CT3 (also known as 24101).

[0194] SEQ ID NO: 155 is the determined cDNA sequence for CT6 (also known as 24104).

[0195] SEQ ID NO: 156 is the determined cDNA sequence for CT7 (also known as 24105).

[0196] SEQ ID NO: 157 is the determined cDNA sequence for CT12 (also known as 24110).

[0197] SEQ ID NO: 158 is the determined cDNA sequence for CT13 (also known as 24111).

[0198] SEQ ID NO: 159 is the determined cDNA sequence for CT14 (also known as 24112).

[0199] SEQ ID NO: 160 is the determined cDNA sequence for CT15 (also known as 24113).

[0200] SEQ ID NO: 161 is the determined cDNA sequence for CT17 (also known as 24115).

[0201] SEQ ID NO: 162 is the determined cDNA sequence for CT18 (also known as 24116).

[0202] SEQ ID NO: 163 is the determined cDNA sequence for CT22 (also known as 23848).

[0203] SEQ ID NO: 164 is the determined cDNA sequence for CT24 (also known as 23849).

[0204] SEQ ID NO: 165 is the determined cDNA sequence for CT31 (also known as 23854).

[0205] SEQ ID NO: 166 is the determined cDNA sequence for CT34 (also known as 23856).

[0206] SEQ ID NO: 167 is the determined cDNA sequence for CT37 (also known as 23859).

[0207] SEQ ID NO: 168 is the determined cDNA sequence for CT39 (also known as 23860).

[0208] SEQ ID NO: 169 is the determined cDNA sequence for CT40 (also known as 23861).

[0209] SEQ ID NO: 170 is the determined cDNA sequence for CT51 (also known as 24130).

[0210] SEQ ID NO: 171 is the determined cDNA sequence for CT53 (also known as 24132).

[0211] SEQ ID NO: 172 is the determined cDNA sequence for CT63 (also known as 24595).

[0212] SEQ ID NO: 173 is the determined cDNA sequence for CT88 (also known as 24608).

[0213] SEQ ID NO: 174 is the determined cDNA sequence for CT92 (also known as 24800).

[0214] SEQ ID NO: 175 is the determined cDNA sequence for CT94 (also known as 24802).

[0215] SEQ ID NO: 176 is the determined cDNA sequence for CT102 (also known as 24805).

[0216] SEQ ID NO: 177 is the determined cDNA sequence for CT103 (also known as 24806).

[0217] SEQ ID NO: 178 is the determined cDNA sequence for CT111 (also known as 25520).

[0218] SEQ ID NO: 179 is the determined cDNA sequence for CT118 (also known as 25522).

[0219] SEQ ID NO: 180 is the determined cDNA sequence for CT121 (also known as 25523).

[0220] SEQ ID NO: 181 is the determined cDNA sequence for CT126 (also known as 25527).

[0221] SEQ ID NO: 182 is the determined cDNA sequence for CT135 (also known as 25534).

[0222] SEQ ID NO: 183 is the determined cDNA sequence for CT140 (also known as 25537).

[0223] SEQ ID NO: 184 is the determined cDNA sequence for CT145 (also known as 25542).

[0224] SEQ ID NO: 185 is the determined cDNA sequence for CT147 (also known as 25543).

[0225] SEQ ID NO: 186 is the determined cDNA sequence for CT148 (also known as 25544).

[0226] SEQ ID NO: 187 is the determined cDNA sequence for CT502 (also known as 26420).

[0227] SEQ ID NO: 188 is the determined cDNA sequence for CT507 (also known as 26425).

[0228] SEQ ID NO: 189 is the determined cDNA sequence for CT521 (also known as 27366).

[0229] SEQ ID NO: 190 is the determined cDNA sequence for CT544 (also known as 27375).

[0230] SEQ ID NO: 191 is the determined cDNA sequence for CT577 (also known as 27385).

[0231] SEQ ID NO: 192 is the determined cDNA sequence for CT580 (also known as 27387).

[0232] SEQ ID NO: 193 is the determined cDNA sequence for CT594 (also known as 27540).

[0233] SEQ ID NO: 194 is the determined cDNA sequence for CT606 (also known as 27547).

[0234] SEQ ID NO: 195 is the determined cDNA sequence for CT607 (also known as 27548).

[0235] SEQ ID NO: 196 is the determined cDNA sequence for CT599 (also known as 27903).

[0236] SEQ ID NO: 197 is the determined cDNA sequence for CT632 (also known as 27922).

[0237] SEQ ID NO: 198 is the predicted amino acid sequence for CT502 (SEQ ID NO: 187).

[0238] SEQ ID NO: 199 is the predicted amino acid sequence for CT507 (SEQ ID NO: 188).

[0239] SEQ ID NO: 200 is the predicted amino acid sequence for CT521 (SEQ ID NO: 189).

[0240] SEQ ID NO: 201 is the predicted amino acid sequence for CT544 (SEQ ID NO: 190).

[0241] SEQ ID NO: 202 is the predicted amino acid sequence for CT606 (SEQ ID NO: 194).

[0242] SEQ ID NO: 203 is the predicted amino acid sequence for CT607 (SEQ ID NO: 195).

[0243] SEQ ID NO: 204 is the predicted amino acid sequence for CT632 (SEQ ID NO: 197).

[0244] SEQ ID NO: 205 is the determined cDNA sequence for clone 25244.

[0245] SEQ ID NO: 206 is the determined cDNA sequence for clone 25245.

[0246] SEQ ID NO: 207 is the determined cDNA sequence for clone 25246.

[0247] SEQ ID NO: 208 is the determined cDNA sequence for clone 25248.

[0248] SEQ ID NO: 209 is the determined cDNA sequence for clone 25249.

[0249] SEQ ID NO: 210 is the determined cDNA sequence for clone 25250.

[0250] SEQ ID NO: 211 is the determined cDNA sequence for clone 25251.

[0251] SEQ ID NO: 212 is the determined cDNA sequence for clone 25252.

[0252] SEQ ID NO: 213 is the determined cDNA sequence for clone 25253.

[0253] SEQ ID NO: 214 is the determined cDNA sequence for clone 25254.

[0254] SEQ ID NO: 215 is the determined cDNA sequence for clone 25255.

[0255] SEQ ID NO: 216 is the determined cDNA sequence for clone 25256.

[0256] SEQ ID NO: 217 is the determined cDNA sequence for clone 25257.

[0257] SEQ ID NO: 218 is the determined cDNA sequence for clone 25259.

[0258] SEQ ID NO: 219 is the determined cDNA sequence for clone 25260.

[0259] SEQ ID NO: 220 is the determined cDNA sequence for clone 25261.

[0260] SEQ ID NO: 221 is the determined cDNA sequence for clone 25262.

[0261] SEQ ID NO: 222 is the determined cDNA sequence for clone 25263.

[0262] SEQ ID NO: 223 is the determined cDNA sequence for clone 25264.

[0263] SEQ ID NO: 224 is the determined cDNA sequence for clone 25265.

[0264] SEQ ID NO: 225 is the determined cDNA sequence for clone 25266.

[0265] SEQ ID NO: 226 is the determined cDNA sequence for clone 25267.

[0266] SEQ ID NO: 227 is the determined cDNA sequence for clone 25268.

[0267] SEQ ID NO: 228 is the determined cDNA sequence for clone 25269.

[0268] SEQ ID NO: 229 is the determined cDNA sequence for clone 25271.

[0269] SEQ ID NO: 230 is the determined cDNA sequence for clone 25272.

[0270] SEQ ID NO: 231 is the determined cDNA sequence for clone 25273.

[0271] SEQ ID NO: 232 is the determined cDNA sequence for clone 25274.

[0272] SEQ ID NO: 233 is the determined cDNA sequence for clone 25275.

[0273] SEQ ID NO: 234 is the determined cDNA sequence for clone 25276.

[0274] SEQ ID NO: 235 is the determined cDNA sequence for clone 25277.

[0275] SEQ ID NO: 236 is the determined cDNA sequence for clone 25278.

[0276] SEQ ID NO: 237 is the determined cDNA sequence for clone 25280.

[0277] SEQ ID NO: 238 is the determined cDNA sequence for clone 25281.

[0278] SEQ ID NO: 239 is the determined cDNA sequence for clone 25282.

[0279] SEQ ID NO: 240 is the determined cDNA sequence for clone 25283.

[0280] SEQ ID NO: 241 is the determined cDNA sequence for clone 25284.

[0281] SEQ ID NO: 242 is the determined cDNA sequence for clone 25285.

[0282] SEQ ID NO: 243 is the determined cDNA sequence for clone 25286.

[0283] SEQ ID NO: 244 is the determined cDNA sequence for clone 25287.

[0284] SEQ ID NO: 245 is the determined cDNA sequence for clone 25288.

[0285] SEQ ID NO: 246 is the determined cDNA sequence for clone 25289.

[0286] SEQ ID NO: 247 is the determined cDNA sequence for clone 25290.

[0287] SEQ ID NO: 248 is the determined cDNA sequence for clone 25291.

[0288] SEQ ID NO: 249 is the determined cDNA sequence for clone 25292.

[0289] SEQ ID NO: 250 is the determined cDNA sequence for clone 25293.

[0290] SEQ ID NO: 251 is the determined cDNA sequence for clone 25294.

[0291] SEQ ID NO: 252 is the determined cDNA sequence for clone 25295.

[0292] SEQ ID NO: 253 is the determined cDNA sequence for clone 25296.

[0293] SEQ ID NO: 254 is the determined cDNA sequence for clone 25297.

[0294] SEQ ID NO: 255 is the determined cDNA sequence for clone 25418.

[0295] SEQ ID NO: 256 is the determined cDNA sequence for clone 25419.

[0296] SEQ ID NO: 257 is the determined cDNA sequence for clone 25420.

[0297] SEQ ID NO: 258 is the determined cDNA sequence for clone 25421.

[0298] SEQ ID NO: 259 is the determined cDNA sequence for clone 25422.

[0299] SEQ ID NO: 260 is the determined cDNA sequence for clone 25423.

[0300] SEQ ID NO: 261 is the determined cDNA sequence for clone 25424.

[0301] SEQ ID NO: 262 is the determined cDNA sequence for clone 25426.

[0302] SEQ ID NO: 263 is the determined cDNA sequence for clone 25427.

[0303] SEQ ID NO: 264 is the determined cDNA sequence for clone 25428.

[0304] SEQ ID NO: 265 is the determined cDNA sequence for clone 25429.

[0305] SEQ ID NO: 266 is the determined cDNA sequence for clone 25430.

[0306] SEQ ID NO: 267 is the determined cDNA sequence for clone 25431.

[0307] SEQ ID NO: 268 is the determined cDNA sequence for clone 25432.

[0308] SEQ ID NO: 269 is the determined cDNA sequence for clone 25433.

[0309] SEQ ID NO: 270 is the determined cDNA sequence for clone 25434.

[0310] SEQ ID NO: 271 is the determined cDNA sequence for clone 25435.

[0311] SEQ ID NO: 272 is the determined cDNA sequence for clone 25436.

[0312] SEQ ID NO: 273 is the determined cDNA sequence for clone 25437.

[0313] SEQ ID NO: 274 is the determined cDNA sequence for clone 25438.

[0314] SEQ ID NO: 275 is the determined cDNA sequence for clone 25439.

[0315] SEQ ID NO: 276 is the determined cDNA sequence for clone 25440.

[0316] SEQ ID NO: 277 is the determined cDNA sequence for clone 25441.

[0317] SEQ ID NO: 278 is the determined cDNA sequence for clone 25442.

[0318] SEQ ID NO: 279 is the determined cDNA sequence for clone 25443.

[0319] SEQ ID NO: 280 is the determined cDNA sequence for clone 25444.

[0320] SEQ ID NO: 281 is the determined cDNA sequence for clone 25445.

[0321] SEQ ID NO: 282 is the determined cDNA sequence for clone 25446.

[0322] SEQ ID NO: 283 is the determined cDNA sequence for clone 25447.

[0323] SEQ ID NO: 284 is the determined cDNA sequence for clone 25448.

[0324] SEQ ID NO: 285 is the determined cDNA sequence for clone 25844.

[0325] SEQ ID NO: 286 is the determined cDNA sequence for clone 25845.

[0326] SEQ ID NO: 287 is the determined cDNA sequence for clone 25846.

[0327] SEQ ID NO: 288 is the determined cDNA sequence for clone 25847.

[0328] SEQ ID NO: 289 is the determined cDNA sequence for clone 25848.

[0329] SEQ ID NO: 290 is the determined cDNA sequence for clone 25850.

[0330] SEQ ID NO: 291 is the determined cDNA sequence for clone 25851.

[0331] SEQ ID NO: 292 is the determined cDNA sequence for clone 25852.

[0332] SEQ ID NO: 293 is the determined cDNA sequence for clone 25853.

[0333] SEQ ID NO: 294 is the determined cDNA sequence for clone 25854.

[0334] SEQ ID NO: 295 is the determined cDNA sequence for clone 25855.

[0335] SEQ ID NO: 296 is the determined cDNA sequence for clone 25856.

[0336] SEQ ID NO: 297 is the determined cDNA sequence for clone 25857.

[0337] SEQ ID NO: 298 is the determined cDNA sequence for clone 25858.

[0338] SEQ ID NO: 299 is the determined cDNA sequence for clone 25859.

[0339] SEQ ID NO: 300 is the determined cDNA sequence for clone 25860.

[0340] SEQ ID NO: 301 is the determined cDNA sequence for clone 25861.

[0341] SEQ ID NO: 302 is the determined cDNA sequence for clone 25862.

[0342] SEQ ID NO: 303 is the determined cDNA sequence for clone 25863.

[0343] SEQ ID NO: 304 is the determined cDNA sequence for clone 25864.

[0344] SEQ ID NO: 305 is the determined cDNA sequence for clone 25865.

[0345] SEQ ID NO: 306 is the determined cDNA sequence for clone 25866.

[0346] SEQ ID NO: 307 is the determined cDNA sequence for clone 25867.

[0347] SEQ ID NO: 308 is the determined cDNA sequence for clone 25868.

[0348] SEQ ID NO: 309 is the determined cDNA sequence for clone 25869.

[0349] SEQ ID NO: 310 is the determined cDNA sequence for clone 25870.

[0350] SEQ ID NO: 311 is the determined cDNA sequence for clone 25871.

[0351] SEQ ID NO: 312 is the determined cDNA sequence for clone 25872.

[0352] SEQ ID NO: 313 is the determined cDNA sequence for clone 25873.

[0353] SEQ ID NO: 314 is the determined cDNA sequence for clone 25875.

[0354] SEQ ID NO: 315 is the determined cDNA sequence for clone 25876.

[0355] SEQ ID NO: 316 is the determined cDNA sequence for clone 25877.

[0356] SEQ ID NO: 317 is the determined cDNA sequence for clone 25878.

[0357] SEQ ID NO: 318 is the determined cDNA sequence for clone 25879.

[0358] SEQ ID NO: 319 is the determined cDNA sequence for clone 25880.

[0359] SEQ ID NO: 320 is the determined cDNA sequence for clone 25881.

[0360] SEQ ID NO: 321 is the determined cDNA sequence for clone 25882.

[0361] SEQ ID NO: 322 is the determined cDNA sequence for clone 25883.

[0362] SEQ ID NO: 323 is the determined cDNA sequence for clone 25884.

[0363] SEQ ID NO: 324 is the determined cDNA sequence for clone 25885.

[0364] SEQ ID NO: 325 is the determined cDNA sequence for clone 25886.

[0365] SEQ ID NO: 326 is the determined cDNA sequence for clone 25887.

[0366] SEQ ID NO: 327 is the determined cDNA sequence for clone 25888.

[0367] SEQ ID NO: 328 is the determined cDNA sequence for clone 25889.

[0368] SEQ ID NO: 329 is the determined cDNA sequence for clone 25890.

[0369] SEQ ID NO: 330 is the determined cDNA sequence for clone 25892.

[0370] SEQ ID NO: 331 is the determined cDNA sequence for clone 25894.

[0371] SEQ ID NO: 332 is the determined cDNA sequence for clone 25895.

[0372] SEQ ID NO: 333 is the determined cDNA sequence for clone 25896.

[0373] SEQ ID NO: 334 is the determined cDNA sequence for clone 25897.

[0374] SEQ ID NO: 335 is the determined cDNA sequence for clone 25899.

[0375] SEQ ID NO: 336 is the determined cDNA sequence for clone 25900.

[0376] SEQ ID NO: 337 is the determined cDNA sequence for clone 25901.

[0377] SEQ ID NO: 338 is the determined cDNA sequence for clone 25902.

[0378] SEQ ID NO: 339 is the determined cDNA sequence for clone 25903.

[0379] SEQ ID NO: 340 is the determined cDNA sequence for clone 25904.

[0380] SEQ ID NO: 341 is the determined cDNA sequence for clone 25906.

[0381] SEQ ID NO: 342 is the determined cDNA sequence for clone 25907.

[0382] SEQ ID NO: 343 is the determined cDNA sequence for clone 25908.

[0383] SEQ ID NO: 344 is the determined cDNA sequence for clone 25909.

[0384] SEQ ID NO: 345 is the determined cDNA sequence for clone 25910.

[0385] SEQ ID NO: 346 is the determined cDNA sequence for clone 25911.

[0386] SEQ ID NO: 347 is the determined cDNA sequence for clone 25912.

[0387] SEQ ID NO: 348 is the determined cDNA sequence for clone 25913.

[0388] SEQ ID NO: 349 is the determined cDNA sequence for clone 25914.

[0389] SEQ ID NO: 350 is the determined cDNA sequence for clone 25915.

[0390] SEQ ID NO: 351 is the determined cDNA sequence for clone 25916.

[0391] SEQ ID NO: 352 is the determined cDNA sequence for clone 25917.

[0392] SEQ ID NO: 353 is the determined cDNA sequence for clone 25918.

[0393] SEQ ID NO: 354 is the determined cDNA sequence for clone 25919.

[0394] SEQ ID NO: 355 is the determined cDNA sequence for clone 25920.

[0395] SEQ ID NO: 356 is the determined cDNA sequence for clone 25921.

[0396] SEQ ID NO: 357 is the determined cDNA sequence for clone 25922.

[0397] SEQ ID NO: 358 is the determined cDNA sequence for clone 25924.

[0398] SEQ ID NO: 359 is the determined cDNA sequence for clone 25925.

[0399] SEQ ID NO: 360 is the determined cDNA sequence for clone 25926.

[0400] SEQ ID NO: 361 is the determined cDNA sequence for clone 25927.

[0401] SEQ ID NO: 362 is the determined cDNA sequence for clone 25928.

[0402] SEQ ID NO: 363 is the determined cDNA sequence for clone 25929.

[0403] SEQ ID NO: 364 is the determined cDNA sequence for clone 25930.

[0404] SEQ ID NO: 365 is the determined cDNA sequence for clone 25931.

[0405] SEQ ID NO: 366 is the determined cDNA sequence for clone 25932.

[0406] SEQ ID NO: 367 is the determined cDNA sequence for clone 25933.

[0407] SEQ ID NO: 368 is the determined cDNA sequence for clone 25934.

[0408] SEQ ID NO: 369 is the determined cDNA sequence for clone 25935.

[0409] SEQ ID NO: 370 is the determined cDNA sequence for clone 25936.

[0410] SEQ ID NO: 371 is the determined cDNA sequence for clone 25939.

[0411] SEQ ID NO: 372 is the determined cDNA sequence for clone 32016.

[0412] SEQ ID NO: 373 is the determined cDNA sequence for clone 32021.

[0413] SEQ ID NO: 374 is the determined cDNA sequence for clone 31993.

[0414] SEQ ID NO: 375 is the determined cDNA sequence for clone 31997.

[0415] SEQ ID NO: 376 is the determined cDNA sequence for clone 31942.

[0416] SEQ ID NO: 377 is the determined cDNA sequence for clone 31937.

[0417] SEQ ID NO: 378 is the determined cDNA sequence for clone 31952.

[0418] SEQ ID NO: 379 is the determined cDNA sequence for clone 31992.

[0419] SEQ ID NO: 380 is the determined cDNA sequence for clone 31961.

[0420] SEQ ID NO: 381 is the determined cDNA sequence for clone 31964.

[0421] SEQ ID NO: 382 is the determined cDNA sequence for clone 2005.

[0422] SEQ ID NO: 383 is the determined cDNA sequence for clone 31980.

[0423] SEQ ID NO: 384 is the determined cDNA sequence for clone 31940.

[0424] SEQ ID NO: 385 is the determined cDNA sequence for clone 32004.

[0425] SEQ ID NO: 386 is the determined cDNA sequence for clone 31956.

[0426] SEQ ID NO: 387 is the determined cDNA sequence for clone 31934.

[0427] SEQ ID NO: 388 is the determined cDNA sequence for clone 31998.

[0428] SEQ ID NO: 389 is the determined cDNA sequence for clone 31973.

[0429] SEQ ID NO: 390 is the determined cDNA sequence for clone 31976.

[0430] SEQ ID NO: 391 is the determined cDNA sequence for clone 31988.

[0431] SEQ ID NO: 392 is the determined cDNA sequence for clone 31948.

[0432] SEQ ID NO: 393 is the determined cDNA sequence for clone 32013.

[0433] SEQ ID NO: 394 is the determined cDNA sequence for clone 31986.

[0434] SEQ ID NO: 395 is the determined cDNA sequence for clone 31954.

[0435] SEQ ID NO: 396 is the determined cDNA sequence for clone 31987.

[0436] SEQ ID NO: 397 is the determined cDNA sequence for clone 32029.

[0437] SEQ ID NO: 398 is the determined cDNA sequence for clone 32028.

[0438] SEQ ID NO: 399 is the determined cDNA sequence for clone 32012.

[0439] SEQ ID NO: 400 is the determined cDNA sequence for clone 31959.

[0440] SEQ ID NO: 401 is the determined cDNA sequence for clone 32027.

[0441] SEQ ID NO: 402 is the determined cDNA sequence for clone 31957.

[0442] SEQ ID NO: 403 is the determined cDNA sequence for clone 31950.

[0443] SEQ ID NO: 404 is the determined cDNA sequence for clone 32011.

[0444] SEQ ID NO: 405 is the determined cDNA sequence for clone 32022.

[0445] SEQ ID NO: 406 is the determined cDNA sequence for clone 32014.

[0446] SEQ ID NO: 407 is the determined cDNA sequence for clone 31963.

[0447] SEQ ID NO: 408 is the determined cDNA sequence for clone 31989.

[0448] SEQ ID NO: 409 is the determined cDNA sequence for clone 32015.

[0449] SEQ ID NO: 410 is the determined cDNA sequence for clone 32002.

[0450] SEQ ID NO: 411 is the determined cDNA sequence for clone 31939.

[0451] SEQ ID NO: 412 is the determined cDNA sequence for clone 32003.

[0452] SEQ ID NO: 413 is the determined cDNA sequence for clone 31936.

[0453] SEQ ID NO: 414 is the determined cDNA sequence for clone 32007.

[0454] SEQ ID NO: 415 is the determined cDNA sequence for clone 31965.

[0455] SEQ ID NO: 416 is the determined cDNA sequence for clone 31935.

[0456] SEQ ID NO: 417 is the determined cDNA sequence for clone 32008.

[0457] SEQ ID NO: 418 is the determined cDNA sequence for clone 31966.

[0458] SEQ ID NO: 419 is the determined cDNA sequence for clone 32020.

[0459] SEQ ID NO: 420 is the determined cDNA sequence for clone 31971.

[0460] SEQ ID NO: 421 is the determined cDNA sequence for clone 31977.

[0461] SEQ ID NO: 422 is the determined cDNA sequence for clone 31985.

[0462] SEQ ID NO: 423 is the determined cDNA sequence for clone 32023.

[0463] SEQ ID NO: 424 is the determined cDNA sequence for clone 31981.

[0464] SEQ ID NO: 425 is the determined cDNA sequence for clone 32006.

[0465] SEQ ID NO: 426 is the determined cDNA sequence for clone 31991.

[0466] SEQ ID NO: 427 is the determined cDNA sequence for clone 31995.

[0467] SEQ ID NO: 428 is the determined cDNA sequence for clone 32000.

[0468] SEQ ID NO: 429 is the determined cDNA sequence for clone 31990.

[0469] SEQ ID NO: 430 is the determined cDNA sequence for clone 31946.

[0470] SEQ ID NO: 431 is the determined cDNA sequence for clone 31938.

[0471] SEQ ID NO: 432 is the determined cDNA sequence for clone 31941.

[0472] SEQ ID NO: 433 is the determined cDNA sequence for clone 31982.

[0473] SEQ ID NO: 434 is the determined cDNA sequence for clone 31996.

[0474] SEQ ID NO: 435 is the determined cDNA sequence for clone 32010.

[0475] SEQ ID NO: 436 is the determined cDNA sequence for clone 31974.

[0476] SEQ ID NO: 437 is the determined cDNA sequence for clone 31983.

[0477] SEQ ID NO: 438 is the determined cDNA sequence for clone 31999.

[0478] SEQ ID NO: 439 is the determined cDNA sequence for clone 31949.

[0479] SEQ ID NO: 440 is the determined cDNA sequence for clone 31947.

[0480] SEQ ID NO: 441 is the determined cDNA sequence for clone 31994.

[0481] SEQ ID NO: 442 is the determined cDNA sequence for clone 31958.

[0482] SEQ ID NO: 443 is the determined cDNA sequence for clone 31975.

[0483] SEQ ID NO: 444 is the determined cDNA sequence for clone 31984.

[0484] SEQ ID NO: 445 is the determined cDNA sequence for clone 32024.

[0485] SEQ ID NO: 446 is the determined cDNA sequence for clone 31972.

[0486] SEQ ID NO: 447 is the determined cDNA sequence for clone 31943.

[0487] SEQ ID NO: 448 is the determined cDNA sequence for clone 32018.

[0488] SEQ ID NO: 449 is the determined cDNA sequence for clone 32026.

[0489] SEQ ID NO: 450 is the determined cDNA sequence for clone 32009.

[0490] SEQ ID NO: 451 is the determined cDNA sequence for clone 32019.

[0491] SEQ ID NO: 452 is the determined cDNA sequence for clone 32025.

[0492] SEQ ID NO: 453 is the determined cDNA sequence for clone 31967.

[0493] SEQ ID NO: 454 is the determined cDNA sequence for clone 31968.

[0494] SEQ ID NO: 455 is the determined cDNA sequence for clone 31955.

[0495] SEQ ID NO: 456 is the determined cDNA sequence for clone 31951.

[0496] SEQ ID NO: 457 is the determined cDNA sequence for clone 31970.

[0497] SEQ ID NO: 458 is the determined cDNA sequence for clone 31962.

[0498] SEQ ID NO: 459 is the determined cDNA sequence for clone 32001.

[0499] SEQ ID NO: 460 is the determined cDNA sequence for clone 31953.

[0500] SEQ ID NO: 461 is the determined cDNA sequence for clone 31944.

[0501] SEQ ID NO: 462 is the determined cDNA sequence for clone 31825.

[0502] SEQ ID NO: 463 is the determined cDNA sequence for clone 31828.

[0503] SEQ ID NO: 464 is the determined cDNA sequence for clone 31830.

[0504] SEQ ID NO: 465 is the determined cDNA sequence for clone 31841.

[0505] SEQ ID NO: 466 is the determined cDNA sequence for clone 31847.

[0506] SEQ ID NO: 467 is the determined cDNA sequence for clone 31850.

[0507] SEQ ID NO: 468 is the determined cDNA sequence for clone 31852.

[0508] SEQ ID NO: 469 is the determined cDNA sequence for clone 31855.

[0509] SEQ ID NO: 470 is the determined cDNA sequence for clone 31858.

[0510] SEQ ID NO: 471 is the determined cDNA sequence for clone 31861.

[0511] SEQ ID NO: 472 is the determined cDNA sequence for clone 31868.

[0512] SEQ ID NO: 473 is the determined cDNA sequence for clone 31870.

[0513] SEQ ID NO: 474 is the determined cDNA sequence for clone 31872.

[0514] SEQ ID NO: 475 is the determined cDNA sequence for clone 31873.

[0515] SEQ ID NO: 476 is the determined cDNA sequence for clone 31877.

[0516] SEQ ID NO: 477 is the determined cDNA sequence for clone 31878.

[0517] SEQ ID NO: 478 is the determined cDNA sequence for clone 31885.

[0518] SEQ ID NO: 479 is the determined cDNA sequence for clone 31888.

[0519] SEQ ID NO: 480 is the determined cDNA sequence for clone 31890.

[0520] SEQ ID NO: 481 is the determined cDNA sequence for clone 31893.

[0521] SEQ ID NO: 482 is the determined cDNA sequence for clone 31898.

[0522] SEQ ID NO: 483 is the determined cDNA sequence for clone 31901.

[0523] SEQ ID NO: 484 is the determined cDNA sequence for clone 31909.

[0524] SEQ ID NO: 485 is the determined cDNA sequence for clone 31910.

[0525] SEQ ID NO: 486 is the determined cDNA sequence for clone 31914.

[0526] SEQ ID NO: 487 is the determined cDNA sequence for contig 1.

[0527] SEQ ID NO: 488 is the determined cDNA sequence for contig 2.

[0528] SEQ ID NO: 489 is the determined cDNA sequence for contig 3.

[0529] SEQ ID NO: 490 is the determined cDNA sequence for contig 4.

[0530] SEQ ID NO: 491 is the determined cDNA sequence for contig 5.

[0531] SEQ ID NO: 492 is the determined cDNA sequence for contig 6.

[0532] SEQ ID NO: 493 is the determined cDNA sequence for contig 7.

[0533] SEQ ID NO: 494 is the determined cDNA sequence for contig 8.

[0534] SEQ ID NO: 495 is the determined cDNA sequence for contig 9.

[0535] SEQ ID NO: 496 is the determined cDNA sequence for contig 10.

[0536] SEQ ID NO: 497 is the determined cDNA sequence for contig 11.

[0537] SEQ ID NO: 498 is the determined cDNA sequence for contig 12.

[0538] SEQ ID NO: 499 is the determined cDNA sequence for contig 13.

[0539] SEQ ID NO: 500 is the determined cDNA sequence for contig 14.

[0540] SEQ ID NO: 501 is the determined cDNA sequence for contig 15.

[0541] SEQ ID NO: 502 is the determined cDNA sequence for contig 16.

[0542] SEQ ID NO: 503 is the determined cDNA sequence for contig 17.

[0543] SEQ ID NO: 504 is the determined cDNA sequence for contig 18.

[0544] SEQ ID NO: 505 is the determined cDNA sequence for contig 19.

[0545] SEQ ID NO: 506 is the determined cDNA sequence for contig 20.

[0546] SEQ ID NO: 507 is the determined cDNA sequence for contig 21.

[0547] SEQ ID NO: 508 is the determined cDNA sequence for contig 22.

[0548] SEQ ID NO: 509 is the determined cDNA sequence for contig 23.

[0549] SEQ ID NO: 510 is the determined cDNA sequence for contig 24.

[0550] SEQ ID NO: 511 is the determined cDNA sequence for contig 25.

[0551] SEQ ID NO: 512 is the determined cDNA sequence for contig 26.

[0552] SEQ ID NO: 513 is the determined cDNA sequence for contig 27.

[0553] SEQ ID NO: 514 is the determined cDNA sequence for contig 28.

[0554] SEQ ID NO: 515 is the determined cDNA sequence for contig 29.

[0555] SEQ ID NO: 516 is the determined cDNA sequence for contig 30.

[0556] SEQ ID NO: 517 is the determined cDNA sequence for contig 31.

[0557] SEQ ID NO: 518 is the determined cDNA sequence for contig 32.

[0558] SEQ ID NO: 519 is the determined cDNA sequence for contig 33.

[0559] SEQ ID NO: 520 is the determined cDNA sequence for contig 34.

[0560] SEQ ID NO: 521 is the determined cDNA sequence for contig 35.

[0561] SEQ ID NO: 522 is the determined cDNA sequence for contig 36.

[0562] SEQ ID NO: 523 is the determined cDNA sequence for contig 37.

[0563] SEQ ID NO: 524 is the determined cDNA sequence for contig 38.

[0564] SEQ ID NO: 525 is the determined cDNA sequence for contig 39.

[0565] SEQ ID NO: 526 is the determined cDNA sequence for contig 40.

[0566] SEQ ID NO: 527 is the determined cDNA sequence for contig 41.

[0567] SEQ ID NO: 528 is the determined cDNA sequence for contig 42.

[0568] SEQ ID NO: 529 is the determined cDNA sequence for contig 43.

[0569] SEQ ID NO: 530 is the determined cDNA sequence for contig 44.

[0570] SEQ ID NO: 531 is the determined cDNA sequence for contig 45.

[0571] SEQ ID NO: 532 is the determined cDNA sequence for contig 46.

[0572] SEQ ID NO: 533 is the determined cDNA sequence for contig 47.

[0573] SEQ ID NO: 534 is the determined cDNA sequence for contig 48.

[0574] SEQ ID NO: 535 is the determined cDNA sequence for contig 49.

[0575] SEQ ID NO: 536 is the determined cDNA sequence for contig 50.

[0576] SEQ ID NO: 537 is the determined cDNA sequence for contig 51.

[0577] SEQ ID NO: 538 is the determined cDNA sequence for contig 52.

[0578] SEQ ID NO: 539 is the determined cDNA sequence for contig 53.

[0579] SEQ ID NO: 540 is the determined cDNA sequence for contig 54.

[0580] SEQ ID NO: 541 is the determined cDNA sequence for contig 55.

[0581] SEQ ID NO: 542 is the determined cDNA sequence for contig 56.

[0582] SEQ ID NO: 543 is the determined cDNA sequence for contig 58.

[0583] SEQ ID NO: 544 is the determined cDNA sequence for contig 59.

[0584] SEQ ID NO: 545 is the determined cDNA sequence for contig 60.

[0585] SEQ ID NO: 546 is the determined cDNA sequence for contig 61.

[0586] SEQ ID NO: 547 is the determined cDNA sequence for contig 62.

[0587] SEQ ID NO: 548 is the determined cDNA sequence for contig 63.

[0588] SEQ ID NO: 549 is the determined cDNA sequence for contig 64.

[0589] SEQ ID NO: 550 is the determined cDNA sequence for contig 65.

[0590] SEQ ID NO: 551 is the determined cDNA sequence for contig 66.

[0591] SEQ ID NO: 552 is the determined cDNA sequence for contig 67.

[0592] SEQ ID NO: 553 is the determined cDNA sequence for contig 68.

[0593] SEQ ID NO: 554 is the determined cDNA sequence for contig 69.

[0594] SEQ ID NO: 555 is the determined cDNA sequence for contig 70.

[0595] SEQ ID NO: 556 is the determined cDNA sequence for contig 71.

[0596] SEQ ID NO: 557 is the determined cDNA sequence for contig 72.

[0597] SEQ ID NO: 558 is the determined cDNA sequence for contig 73.

[0598] SEQ ID NO: 559 is the determined cDNA sequence for contig 74.

[0599] SEQ ID NO: 560 is the determined cDNA sequence for contig 75.

[0600] SEQ ID NO: 561 is the determined cDNA sequence for contig 76.

[0601] SEQ ID NO: 562 is the determined cDNA sequence for contig 77.

[0602] SEQ ID NO: 563 is the determined cDNA sequence for contig 78.

[0603] SEQ ID NO: 564 is the determined cDNA sequence for contig 79.

[0604] SEQ ID NO: 565 is the determined cDNA sequence for contig 80.

[0605] SEQ ID NO: 566 is the determined cDNA sequence for contig 81.

[0606] SEQ ID NO: 567 is the determined cDNA sequence for contig 82.

[0607] SEQ ID NO: 568 is the determined cDNA sequence for contig 83.

[0608] SEQ ID NO: 569 is the determined cDNA sequence for clone CS1-101.

[0609] SEQ ID NO: 570 is the determined cDNA sequence for clone CSI-102.

[0610] SEQ ID NO: 571 is the determined cDNA sequence for clone CS1-104.

[0611] SEQ ID NO: 572 is the determined cDNA sequence for clone CSI-105.

[0612] SEQ ID NO: 573 is the determined 3′ cDNA sequence for clone CS1-106.

[0613] SEQ ID NO: 574 is the determined 5′ cDNA sequence for clone CS1-106.

[0614] SEQ ID NO: 575 is the determined cDNA sequence for clone CS 1-114.

[0615] SEQ ID NO: 576 is the determined cDNA sequence for clone CS1-118.

[0616] SEQ ID NO: 577 is the determined cDNA sequence for clone CS1-120.

[0617] SEQ ID NO: 578 is the determined cDNA sequence for clone CS1-123.

[0618] SEQ ID NO: 579 is the determined 3′ cDNA sequence for clone CS 1-124.

[0619] SEQ ID NO: 580 is the determined 5′ cDNA sequence for clone CS1-124.

[0620] SEQ ID NO: 581 is the determined cDNA sequence for clone CS1-128.

[0621] SEQ ID NO: 582 is the determined cDNA sequence for clone CS1-132.

[0622] SEQ ID NO: 583 is the determined cDNA sequence for clone CS1-136.

[0623] SEQ ID NO: 584 is the determined cDNA sequence for clone CS1-137.

[0624] SEQ ID NO: 585 is the determined cDNA sequence for clone CS1-139.

[0625] SEQ ID NO: 586 is the determined cDNA sequence for clone CS1-141.

[0626] SEQ ID NO: 587 is the determined cDNA sequence for clone CS1-152.

[0627] SEQ ID NO: 588 is the determined cDNA sequence for clone CS1-154.

[0628] SEQ ID NO: 589 is the determined cDNA sequence for clone CS1-156.

[0629] SEQ ID NO: 590 is the determined cDNA sequence for clone CS1-158.

[0630] SEQ ID NO: 591 is the determined cDNA sequence for clone CS1-160.

[0631] SEQ ID NO: 592 is the determined cDNA sequence for clone CS1-168.

[0632] SEQ ID NO: 593 is the determined cDNA sequence for clone CS1-169.

[0633] SEQ ID NO: 594 is the determined cDNA sequence for clone CS1-171.

[0634] SEQ ID NO: 595 is the determined cDNA sequence for clone CS1-176.

[0635] SEQ ID NO: 596 is the determined cDNA sequence for clone CS1-178.

[0636] SEQ ID NO: 597 is the determined cDNA sequence for clone CS1-180.

[0637] SEQ ID NO: 598 is the determined cDNA sequence for clone CS1-183.

[0638] SEQ ID NO: 599 is the determined cDNA sequence for clone CS1-184.

[0639] SEQ ID NO: 600 is the determined cDNA sequence for clone CS1-187.

[0640] SEQ ID NO: 601 is the determined cDNA sequence for clone CS1-190.

[0641] SEQ ID NO: 602 is the determined cDNA sequence for clone CS1-194.

[0642] SEQ ID NO: 603 is the determined cDNA sequence for clone CS1-195.

[0643] SEQ ID NO: 604 is the determined cDNA sequence for clone CS1-196.

[0644] SEQ ID NO: 605 is the determined cDNA sequence for clone CS1-197.

[0645] SEQ ID NO: 606 is the determined cDNA sequence for clone CS1-200.

[0646] SEQ ID NO: 607 is the determined cDNA sequence for clone CS1-206.

[0647] SEQ ID NO: 608 is the determined cDNA sequence for clone CS1-207.

[0648] SEQ ID NO: 609 is the determined cDNA sequence for clone CS1-234.

[0649] SEQ ID NO: 610 is the determined cDNA sequence for clone CS1-238.

[0650] SEQ ID NO: 611 is the determined cDNA sequence for clone CS1-239.

[0651] SEQ ID NO: 612 is the determined cDNA sequence for clone CS1-243.

[0652] SEQ ID NO: 613 is the determined cDNA sequence for clone CS1-246.

[0653] SEQ ID NO: 614 is the determined cDNA sequence for clone CS1-249.

[0654] SEQ ID NO: 615 is the determined cDNA sequence for clone CS1-250.

[0655] SEQ ID NO: 616 is the determined cDNA sequence for clone CS1-252.

[0656] SEQ ID NO: 617 is the determined cDNA sequence for clone CT502.

[0657] SEQ ID NO: 618 is the determined cDNA sequence for clone CT507.

[0658] SEQ ID NO: 619 is the determined cDNA sequence for clone CT521.

[0659] SEQ ID NO: 620 is the determined cDNA sequence for clone CT544.

[0660] SEQ ID NO: 621 is the determined cDNA sequence for clone CT577.

[0661] SEQ ID NO: 622 is the determined cDNA sequence for clone CT580.

[0662] SEQ ID NO: 623 is the determined cDNA sequence for clone CT594 (also referred to by clone ID 27540).

[0663] SEQ ID NO: 624 is the determined cDNA sequence for clone CT606.

[0664] SEQ ID NO: 625 is the determined cDNA sequence for clone CT607.

[0665] SEQ ID NO: 626 is the determined cDNA sequence for clone CT599.

[0666] SEQ ID NO: 627 is the determined cDNA sequence for clone CT632.

[0667] SEQ ID NO: 628 is the determined cDNA sequence for clone 35691.

[0668] SEQ ID NO: 629 is the determined cDNA sequence for clone 35707.

[0669] SEQ ID NO: 630 is the determined cDNA sequence for clone CSE-2.

[0670] SEQ ID NO: 631 is the amino acid sequence for clone CSE-2.

[0671] SEQ ID NO: 632 is the determined cDNA sequence for clone CT2-1.

[0672] SEQ ID NO: 633 is the determined cDNA sequence for clone CT2-6.

[0673] SEQ ID NO: 634 is the determined cDNA sequence for clone CT2-8 which shows similarity to SEQ ID NOs:1112 and 1116.

[0674] SEQ ID NO: 635 is the determined cDNA sequence for clone CT2-9.

[0675] SEQ ID NO: 636 is the determined cDNA sequence for clone CT2-12.

[0676] SEQ ID NO: 637 is the determined cDNA sequence for clone CT2-15.

[0677] SEQ ID NO: 638 is the determined cDNA sequence for clone CT2-16.

[0678] SEQ ID NO: 639 is the determined cDNA sequence for clone CT2-17.

[0679] SEQ ID NO: 640 is the determined cDNA sequence for clone CT2-19.

[0680] SEQ ID NO: 641 is the determined cDNA sequence for clone CT2-23.

[0681] SEQ ID NO: 642 is the determined cDNA sequence for clone CT2-25.

[0682] SEQ ID NO: 643 is the determined cDNA sequence for clone CT2-27.

[0683] SEQ ID NO: 644 is the determined cDNA sequence for clone CT2-35.

[0684] SEQ ID NO: 645 is the determined cDNA sequence for clone CT2-39.

[0685] SEQ ID NO: 646 is the determined cDNA sequence for clone CT2-41.

[0686] SEQ ID NO: 647 is the determined cDNA sequence for clone CT2-43.

[0687] SEQ ID NO: 648 is the determined cDNA sequence for clone CT2-44.

[0688] SEQ ID NO: 649 is the determined cDNA sequence for clone CT2-53.

[0689] SEQ ID NO: 650 is the determined cDNA sequence for clone CT2-54.

[0690] SEQ ID NO: 651 is the determined cDNA sequence for clone CT2-55.

[0691] SEQ ID NO: 652 is the determined cDNA sequence for clone CT2-57.

[0692] SEQ ID NO: 653 is the determined cDNA sequence for clone CT2-60.

[0693] SEQ ID NO: 654 is the determined cDNA sequence for clone CT2-64.

[0694] SEQ ID NO: 655 is the determined cDNA sequence for clone CT2-67.

[0695] SEQ ID NO: 656 is the determined cDNA sequence for clone CT2-68.

[0696] SEQ ID NO: 657 is the determined cDNA sequence for clone CT2-75.

[0697] SEQ ID NO: 658 is the determined cDNA sequence for clone CT2-79.

[0698] SEQ ID NO: 659 is the determined cDNA sequence for clone CT2-109.

[0699] SEQ ID NO: 660 is the determined cDNA sequence for clone CT2-112.

[0700] SEQ ID NO: 661 is the determined cDNA sequence for clone CT2-127.

[0701] SEQ ID NO: 662 is the determined cDNA sequence for clone CT2-129.

[0702] SEQ ID NO: 663 is the determined cDNA sequence for clone CT2-156.

[0703] SEQ ID NO: 664 is the determined cDNA sequence for clone CT2-162.

[0704] SEQ ID NO: 665 is the determined cDNA sequence for clone CT2-167.

[0705] SEQ ID NO: 666 is the determined cDNA sequence for clone CT2-169.

[0706] SEQ ID NO: 667 is the determined cDNA sequence for clone CT2-172.

[0707] SEQ ID NO: 668 is the determined cDNA sequence for clone CT2-173.

[0708] SEQ ID NO: 669 is the determined cDNA sequence for clone CT2-174.

[0709] SEQ ID NO: 670 is the determined cDNA sequence for clone CT2-177.

[0710] SEQ ID NO: 671 is the determined cDNA sequence for clone CT2-181.

[0711] SEQ ID NO: 672 is the determined cDNA sequence for clone CT2-191.

[0712] SEQ ID NO: 673 is the determined cDNA sequence for clone CT2-192.

[0713] SEQ ID NO: 674 is the determined cDNA sequence for clone CT2-207.

[0714] SEQ ID NO: 675 is the determined cDNA sequence for clone CT2-222.

[0715] SEQ ID NO: 676 is the determined cDNA sequence for clone CT2-223.

[0716] SEQ ID NO: 677 is the determined cDNA sequence for clone CT2-233.

[0717] SEQ ID NO: 678 is the determined cDNA sequence for clone CT2-244.

[0718] SEQ ID NO: 679 is the determined cDNA sequence for clone CT2-257.

[0719] SEQ ID NO: 680 is the determined cDNA sequence for clone CT2-279.

[0720] SEQ ID NO: 681 is the determined cDNA sequence for clone CT2-288.

[0721] SEQ ID NO: 682 is the determined cDNA sequence for clone CT2-291.

[0722] SEQ ID NO:683 is the full-length cDNA sequence for human PAC (SEQ ID NOs: 18 and 19).

[0723] SEQ ID NO:684 is the full-length cDNA sequence for murine homologue of human PAC (SEQ ID NO: 683).

[0724] SEQ ID NO:685 is the predicted amino acid sequence for the clone of SEQ ID NO:683.

[0725] SEQ ID NO:686 is a longer determined cDNA sequence for clone CoSub-19 (SEQ ID NO:138).

[0726] SEQ ID NO:687 is the predicted amino acid sequence for the clone of SEQ ID NO:686.

[0727] SEQ ID NO:688 is the nucleotide sequence of the M13 forward primer.

[0728] SEQ ID NO:689 is the nucleotide sequence of the M13 reverse primer.

[0729] SEQ ID NO:690 is a longer determined cDNA sequence for C799P (SEQ ID NO:40), showing homology to homo sapiens NADH/NADPH thyroid oxidase p138-tox mRNA.

[0730] SEQ ID NO:691 is a longer determined cDNA sequence for C794P (SEQ ID NO:41).

[0731] SEQ ID NO:692 is the predicted amino acid sequence for the clone of SEQ ID NO:690.

[0732] SEQ ID NO:693 is the predicted amino acid sequence for the clone of SEQ ID NO:691.

[0733] SEQ ID NO: 694 is the determined EDNA sequence for clone R0093:A03.

[0734] SEQ ID NO: 695 is the determined EDNA sequence for clone R0093:A10.

[0735] SEQ ID NO: 696 is the determined cDNA sequence for clone R0093:A11.

[0736] SEQ ID NO: 697 is the determined cDNA sequence for clone R0093:A12.

[0737] SEQ ID NO: 698 is the determined cDNA sequence for clone R0093:B03.

[0738] SEQ ID NO: 699 is the determined cDNA sequence for clone R0093:B04.

[0739] SEQ ID NO: 700 is the determined cDNA sequence for clone R0093:B09.

[0740] SEQ ID NO: 701 is the determined cDNA sequence for clone R0093:B10.

[0741] SEQ ID NO: 702 is the determined cDNA sequence for clone R0093:B11.

[0742] SEQ ID NO: 703 is the determined cDNA sequence for clone R0093:B12.

[0743] SEQ ID NO: 704 is the determined cDNA sequence for clone R0093:C01.

[0744] SEQ ID NO: 705 is the determined cDNA sequence for clone R0093:C03.

[0745] SEQ ID NO: 706 is the determined cDNA sequence for clone R0093:C04.

[0746] SEQ ID NO: 707 is the determined cDNA sequence for clone R0093:C06.

[0747] SEQ ID NO: 708 is the determined cDNA sequence for clone R0093:C08.

[0748] SEQ ID NO: 709 is the determined cDNA sequence for clone R0093:C09.

[0749] SEQ ID NO: 710 is the determined cDNA sequence for clone R0093:C10.

[0750] SEQ ID NO: 711 is the determined cDNA sequence for clone R0093:C11.

[0751] SEQ ID NO: 712 is the determined cDNA sequence for clone R0093:C12.

[0752] SEQ ID NO: 713 is the determined cDNA sequence for clone R0093:D01.

[0753] SEQ ID NO: 714 is the determined cDNA sequence for clone R0093:D02.

[0754] SEQ ID NO: 715 is the determined cDNA sequence for clone R0093:D03.

[0755] SEQ ID NO: 716 is the determined cDNA sequence for clone R0093:D04.

[0756] SEQ ID NO: 717 is the determined cDNA sequence for clone R0093:D05.

[0757] SEQ ID NO: 718 is the determined cDNA sequence for clone R0093:D06.

[0758] SEQ ID NO: 719 is the determined cDNA sequence for clone R0093:D07.

[0759] SEQ ID NO: 720 is the determined cDNA sequence for clone R0093:D08.

[0760] SEQ ID NO: 721 is the determined cDNA sequence for clone R0093:D10.

[0761] SEQ ID NO: 722 is the determined cDNA sequence for clone R0093:D11.

[0762] SEQ ID NO: 723 is the determined cDNA sequence for clone R0093:E02.

[0763] SEQ ID NO: 724 is the determined cDNA sequence for clone R0093:E03.

[0764] SEQ ID NO: 725 is the determined cDNA sequence for clone R0093:E04.

[0765] SEQ ID NO: 726 is the determined cDNA sequence for clone R0093:B06.

[0766] SEQ ID NO: 727 is the determined cDNA sequence for clone R0093:E07.

[0767] SEQ ID NO: 728 is the determined cDNA sequence for clone R0093:E08.

[0768] SEQ ID NO: 729 is the determined cDNA sequence for clone R0093:E09.

[0769] SEQ ID NO: 730 is the determined cDNA sequence for clone R0093:E10.

[0770] SEQ ID NO: 731 is the determined cDNA sequence for clone R0093:E11.

[0771] SEQ ID NO: 732 is the determined cDNA sequence for clone R0093:F02.

[0772] SEQ ID NO: 733 is the determined cDNA sequence for clone R0093:F03.

[0773] SEQ ID NO: 734 is the determined cDNA sequence for clone R0093:F04.

[0774] SEQ ID NO: 735 is the determined cDNA sequence for clone R0093:F05.

[0775] SEQ ID NO: 736 is the determined cDNA sequence for clone R0093:F06.

[0776] SEQ ID NO: 737 is the determined cDNA sequence for clone R0093:F08.

[0777] SEQ ID NO: 738 is the determined cDNA sequence for clone R0093:F09.

[0778] SEQ ID NO: 739 is the determined cDNA sequence for clone R0093:F10.

[0779] SEQ ID NO: 740 is the determined cDNA sequence for clone R0093:F12.

[0780] SEQ ID NO: 741 is the determined cDNA sequence for clone R0093:G01.

[0781] SEQ ID NO: 742 is the determined cDNA sequence for clone R0093:G03.

[0782] SEQ ID NO: 743 is the determined cDNA sequence for clone R0093:G04.

[0783] SEQ ID NO: 744 is the determined cDNA sequence for clone R0093:G06.

[0784] SEQ ID NO: 745 is the determined cDNA sequence for clone R0093:G07.

[0785] SEQ ID NO: 746 is the determined cDNA sequence for clone R0093:G08.

[0786] SEQ ID NO: 747 is the determined cDNA sequence for clone R0093:G09.

[0787] SEQ ID NO: 748 is the determined cDNA sequence for clone R0093:G10.

[0788] SEQ ID NO: 749 is the determined cDNA sequence for clone R0093:G11.

[0789] SEQ ID NO: 750 is the determined cDNA sequence for clone R0093:G12.

[0790] SEQ ID NO: 751 is the determined cDNA sequence for clone R0093:H02.

[0791] SEQ ID NO: 752 is the determined cDNA sequence for clone R0093:H03.

[0792] SEQ ID NO: 753 is the determined cDNA sequence for clone R0093:H04.

[0793] SEQ ID NO: 754 is the determined cDNA sequence for clone R0093:H05.

[0794] SEQ ID NO: 755 is the determined cDNA sequence for clone R0093:H07.

[0795] SEQ ID NO: 756 is the determined cDNA sequence for clone R0093:H08.

[0796] SEQ ID NO: 757 is the determined cDNA sequence for clone R0093:H09.

[0797] SEQ ID NO: 758 is the determined cDNA sequence for clone R0093:H10.

[0798] SEQ ID NO: 759 is the determined cDNA sequence for clone R0093:H11.

[0799] SEQ ID NO: 760 is the determined cDNA sequence for clone R0094:A03.

[0800] SEQ ID NO: 761 is the determined cDNA sequence for clone R0094:A05.

[0801] SEQ ID NO: 762 is the determined cDNA sequence for clone R0094:A06.

[0802] SEQ ID NO: 763 is the determined cDNA sequence for clone R0094:A07.

[0803] SEQ ID NO: 764 is the determined cDNA sequence for clone R0094:A09.

[0804] SEQ ID NO: 765 is the determined cDNA sequence for clone R0094:A10.

[0805] SEQ ID NO: 766 is the determined cDNA sequence for clone R0094:A12.

[0806] SEQ ID NO: 767 is the determined cDNA sequence for clone R0094:B03.

[0807] SEQ ID NO: 768 is the determined cDNA sequence for clone R0094:B06.

[0808] SEQ ID NO: 769 is the determined cDNA sequence for clone R0094:B08.

[0809] SEQ ID NO: 770 is the determined cDNA sequence for clone R0094:B11.

[0810] SEQ ID NO: 771 is the determined cDNA sequence for clone R0094:B12.

[0811] SEQ ID NO: 772 is the determined cDNA sequence for clone R0094:C01.

[0812] SEQ ID NO: 773 is the determined cDNA sequence for clone R0094:C02.

[0813] SEQ ID NO: 774 is the determined cDNA sequence for clone R0094:C03.

[0814] SEQ ID NO: 775 is the determined cDNA sequence for clone R0094:C05.

[0815] SEQ ID NO: 776 is the determined cDNA sequence for clone R0094:C06.

[0816] SEQ ID NO: 777 is the determined cDNA sequence for clone R0094:C08.

[0817] SEQ ID NO: 778 is the determined cDNA sequence for clone R0094:C09.

[0818] SEQ ID NO: 779 is the determined cDNA sequence for clone R0094:C10.

[0819] SEQ ID NO: 780 is the determined cDNA sequence for clone R0094:C11.

[0820] SEQ ID NO: 781 is the determined cDNA sequence for clone R0094:C12.

[0821] SEQ ID NO: 782 is the determined cDNA sequence for clone R0094:D01.

[0822] SEQ ID NO: 783 is the determined cDNA sequence for clone R0094:D02.

[0823] SEQ ID NO: 784 is the determined cDNA sequence for clone R0094:D03.

[0824] SEQ ID NO: 785 is the determined cDNA sequence for clone R0094:D04.

[0825] SEQ ID NO: 786 is the determined cDNA sequence for clone R0094:D05.

[0826] SEQ ID NO: 787 is the determined EDNA sequence for clone R0094:D07.

[0827] SEQ ID NO: 788 is the determined cDNA sequence for clone R0094:D08.

[0828] SEQ ID NO: 789 is the determined cDNA sequence for clone R0094:D09.

[0829] SEQ ID NO: 790 is the determined cDNA sequence for clone R0094:D10.

[0830] SEQ ID NO: 791 is the determined cDNA sequence for clone R0094:D12.

[0831] SEQ ID NO: 792 is the determined cDNA sequence for clone R0094:E01.

[0832] SEQ ID NO: 793 is the determined cDNA sequence for clone R0094:E02.

[0833] SEQ ID NO: 794 is the determined cDNA sequence for clone R0094:E03.

[0834] SEQ ID NO: 795 is the determined cDNA sequence for clone R0094:E05.

[0835] SEQ ID NO: 796 is the determined cDNA sequence for clone R0094:E06.

[0836] SEQ ID NO: 797 is the determined cDNA sequence for clone R0094:E07.

[0837] SEQ ID NO: 798 is the determined cDNA sequence for clone R0094:E08.

[0838] SEQ ID NO: 799 is the determined cDNA sequence for clone R0094:E09.

[0839] SEQ ID NO: 800 is the determined cDNA sequence for clone R0094:E10.

[0840] SEQ ID NO: 801 is the determined cDNA sequence for clone R0094:E11.

[0841] SEQ ID NO: 802 is the determined cDNA sequence for clone R0094:E12.

[0842] SEQ ID NO: 803 is the determined cDNA sequence for clone R0094:F01.

[0843] SEQ ID NO: 804 is the determined cDNA sequence for clone R0094:F03.

[0844] SEQ ID NO: 805 is the determined cDNA sequence for clone R0094:F05.

[0845] SEQ ID NO: 806 is the determined cDNA sequence for clone R0094:F06.

[0846] SEQ ID NO: 807 is the determined cDNA sequence for clone R0094:F07.

[0847] SEQ ID NO: 808 is the determined cDNA sequence for clone R0094:F08.

[0848] SEQ ID NO: 809 is the determined cDNA sequence for clone R0094:F09.

[0849] SEQ ID NO: 810 is the determined cDNA sequence for clone R0094:F10.

[0850] SEQ ID NO: 811 is the determined cDNA sequence for clone R0094:F11.

[0851] SEQ ID NO: 812 is the determined cDNA sequence for clone R0094:F12.

[0852] SEQ ID NO: 813 is the determined cDNA sequence for clone R0094:G02.

[0853] SEQ ID NO: 814 is the determined cDNA sequence for clone R0094:G03.

[0854] SEQ ID NO: 815 is the determined cDNA sequence for clone R0094:G04.

[0855] SEQ ID NO: 816 is the determined cDNA sequence for clone R0094:G06.

[0856] SEQ ID NO: 817 is the determined cDNA sequence for clone R0094:G07.

[0857] SEQ ID NO: 818 is the determined cDNA sequence for clone R0094:G08.

[0858] SEQ ID NO: 819 is the determined cDNA sequence for clone R0094:G10.

[0859] SEQ ID NO: 820 is the determined cDNA sequence for clone R0094:G11.

[0860] SEQ ID NO: 821 is the determined cDNA sequence for clone R0094:G12.

[0861] SEQ ID NO: 822 is the determined cDNA sequence for clone R0094:H01.

[0862] SEQ ID NO: 823 is the determined cDNA sequence for clone R0094:H03.

[0863] SEQ ID NO: 824 is the determined cDNA sequence for clone R0094:H04.

[0864] SEQ ID NO: 825 is the determined cDNA sequence for clone R0094:H05.

[0865] SEQ ID NO: 826 is the determined cDNA sequence for clone R0094:H06.

[0866] SEQ ID NO: 827 is the determined cDNA sequence for clone R0094:H08.

[0867] SEQ ID NO: 828 is the determined cDNA sequence for clone R0094:H09.

[0868] SEQ ID NO: 829 is the determined cDNA sequence for clone R0094:H10.

[0869] SEQ ID NO: 830 is the determined cDNA sequence for clone R0094:H11.

[0870] SEQ ID NO: 831 is the determined cDNA sequence for clone R0095:A03.

[0871] SEQ ID NO: 832 is the determined cDNA sequence for clone R0095:A06.

[0872] SEQ ID NO: 833 is the determined cDNA sequence for clone R0095:A07.

[0873] SEQ ID NO: 834 is the determined cDNA sequence for clone R0095:B01.

[0874] SEQ ID NO: 835 is the determined cDNA sequence for clone R0095:B02.

[0875] SEQ ID NO: 836 is the determined cDNA sequence for clone R0095:B03.

[0876] SEQ ID NO: 837 is the determined cDNA sequence for clone R0095:B04.

[0877] SEQ ID NO: 838 is the determined cDNA sequence for clone R0095:B05.

[0878] SEQ ID NO: 839 is the determined cDNA sequence for clone R0095:B06.

[0879] SEQ ID NO: 840 is the determined cDNA sequence for clone R0095:B10.

[0880] SEQ ID NO: 841 is the determined cDNA sequence for clone R0095:B11.

[0881] SEQ ID NO: 842 is the determined cDNA sequence for clone R0095:B12.

[0882] SEQ ID NO: 843 is the determined cDNA sequence for clone R0095:C01.

[0883] SEQ ID NO: 844 is the determined cDNA sequence for clone R0095:C03.

[0884] SEQ ID NO: 845 is the determined cDNA sequence for clone R0095:C04.

[0885] SEQ ID NO: 846 is the determined cDNA sequence for clone R0095:C05.

[0886] SEQ ID NO: 847 is the determined cDNA sequence for clone R0095:C06.

[0887] SEQ ID NO: 848 is the determined cDNA sequence for clone R0095:C07.

[0888] SEQ ID NO: 849 is the determined cDNA sequence for clone R0095:C08.

[0889] SEQ ID NO: 850 is the determined cDNA sequence for clone R0095:C10.

[0890] SEQ ID NO: 851 is the determined cDNA sequence for clone R0095:C12.

[0891] SEQ ID NO: 852 is the determined cDNA sequence for clone R0095:D01.

[0892] SEQ ID NO: 853 is the determined cDNA sequence for clone R0095:D03.

[0893] SEQ ID NO: 854 is the determined cDNA sequence for clone R0095:D04.

[0894] SEQ ID NO: 855 is the determined cDNA sequence for clone R0095:D06.

[0895] SEQ ID NO: 856 is the determined cDNA sequence for clone R0095:D07.

[0896] SEQ ID NO: 857 is the determined cDNA sequence for clone R0095:D08.

[0897] SEQ ID NO: 858 is the determined cDNA sequence for clone R0095:D09.

[0898] SEQ ID NO: 859 is the determined cDNA sequence for clone R0095:D11.

[0899] SEQ ID NO: 860 is the determined cDNA sequence for clone R0095:D12.

[0900] SEQ ID NO: 861 is the determined cDNA sequence for clone R0095:E01.

[0901] SEQ ID NO: 862 is the determined cDNA sequence for clone R0095:E02.

[0902] SEQ ID NO: 863 is the determined cDNA sequence for clone R0095:E04.

[0903] SEQ ID NO: 864 is the determined cDNA sequence for clone R0095:E05.

[0904] SEQ ID NO: 865 is the determined cDNA sequence for clone R0095:E06.

[0905] SEQ ID NO: 866 is the determined cDNA sequence for clone R0095:E07.

[0906] SEQ ID NO: 867 is the determined cDNA sequence for clone R0095:E08.

[0907] SEQ ID NO: 868 is the determined cDNA sequence for clone R0095:E11.

[0908] SEQ ID NO: 869 is the determined cDNA sequence for clone R0095:E12.

[0909] SEQ ID NO: 870 is the determined cDNA sequence for clone R0095:F01.

[0910] SEQ ID NO: 871 is the determined cDNA sequence for clone R0095:F03.

[0911] SEQ ID NO: 872 is the determined cDNA sequence for clone R0095:F06.

[0912] SEQ ID NO: 873 is the determined cDNA sequence for clone R0095:F10.

[0913] SEQ ID NO: 874 is the determined cDNA sequence for clone R0095:F11.

[0914] SEQ ID NO: 875 is the determined EDNA sequence for clone R0095:G02.

[0915] SEQ ID NO: 876 is the determined cDNA sequence for clone R0095:G03.

[0916] SEQ ID NO: 877 is the determined cDNA sequence for clone R0095:G04.

[0917] SEQ ID NO: 878 is the determined cDNA sequence for clone R0095:G08.

[0918] SEQ ID NO: 879 is the determined cDNA sequence for clone R0095:G09.

[0919] SEQ ID NO: 880 is the determined cDNA sequence for clone R0095:G10.

[0920] SEQ ID NO: 881 is the determined cDNA sequence for clone R0095:H01.

[0921] SEQ ID NO: 882 is the determined cDNA sequence for clone R0095:H02.

[0922] SEQ ID NO: 883 is the determined cDNA sequence for clone R0095:H04.

[0923] SEQ ID NO: 884 is the determined cDNA sequence for clone R0095:H06.

[0924] SEQ ID NO: 885 is the determined cDNA sequence for clone R0095:H07.

[0925] SEQ ID NO: 886 is the determined cDNA sequence for clone R0095:H09.

[0926] SEQ ID NO: 887 is the determined cDNA sequence for clone R0096:A02.

[0927] SEQ ID NO: 888 is the determined cDNA sequence for clone R0096:A08.

[0928] SEQ ID NO: 889 is the determined cDNA sequence for clone R0096:A09.

[0929] SEQ ID NO: 890 is the determined cDNA sequence for clone R0096:A10.

[0930] SEQ ID NO: 891 is the determined cDNA sequence for clone R0096:A11.

[0931] SEQ ID NO: 892 is the determined cDNA sequence for clone R0096:A12.

[0932] SEQ ID NO: 893 is the determined cDNA sequence for clone R0096:B02.

[0933] SEQ ID NO: 894 is the determined cDNA sequence for clone R0096:B03.

[0934] SEQ ID NO: 895 is the determined cDNA sequence for clone R0096:B04.

[0935] SEQ ID NO: 896 is the determined cDNA sequence for clone R0096:B05.

[0936] SEQ ID NO: 897 is the determined cDNA sequence for clone R0096:B06.

[0937] SEQ ID NO: 898 is the determined cDNA sequence for clone R0096:B07.

[0938] SEQ ID NO: 899 is the determined cDNA sequence for clone R0096:B08.

[0939] SEQ ID NO: 900 is the determined cDNA sequence for clone R0096:B09.

[0940] SEQ ID NO: 901 is the determined cDNA sequence for clone R0096:B10.

[0941] SEQ ID NO: 902 is the determined cDNA sequence for clone R0096:B11.

[0942] SEQ ID NO: 903 is the determined cDNA sequence for clone R0096:B12.

[0943] SEQ ID NO. 904 is the determined cDNA sequence for clone R0096:C01.

[0944] SEQ ID NO: 905 is the determined cDNA sequence for clone R0096:C03.

[0945] SEQ ID NO: 906 is the determined cDNA sequence for clone R0096:C04.

[0946] SEQ ID NO: 907 is the determined cDNA sequence for clone R0096:C05.

[0947] SEQ ID NO: 908 is the determined cDNA sequence for clone R0096:C06.

[0948] SEQ ID NO: 909 is the determined cDNA sequence for clone R0096:C07.

[0949] SEQ ID NO: 910 is the determined cDNA sequence for clone R0096:C08.

[0950] SEQ ID NO: 911 is the determined cDNA sequence for clone R0096:C09.

[0951] SEQ ID NO: 912 is the determined cDNA sequence for clone R0096:C10.

[0952] SEQ ID NO: 913 is the determined cDNA sequence for clone R0096:C11.

[0953] SEQ ID NO: 914 is the determined cDNA sequence for clone R0096:C12.

[0954] SEQ ID NO: 915 is the determined cDNA sequence for clone R0096:D01.

[0955] SEQ ID NO: 916 is the determined cDNA sequence for clone R0096:D02.

[0956] SEQ ID NO: 917 is the determined cDNA sequence for clone R0096:D03.

[0957] SEQ ID NO: 918 is the determined cDNA sequence for clone R0096:D04.

[0958] SEQ ID NO: 919 is the determined cDNA sequence for clone R0096:D05.

[0959] SEQ ID NO: 920 is the determined cDNA sequence for clone R0096:D08.

[0960] SEQ ID NO: 921 is the determined cDNA sequence for clone R0096:D09.

[0961] SEQ ID NO: 922 is the determined cDNA sequence for clone R0096:D10.

[0962] SEQ ID NO: 923 is the determined cDNA sequence for clone R0096:D12.

[0963] SEQ ID NO: 924 is the determined cDNA sequence for clone R0096:E01.

[0964] SEQ ID NO: 925 is the determined cDNA sequence for clone R0096:E02.

[0965] SEQ ID NO: 926 is the determined cDNA sequence for clone R0096:E03.

[0966] SEQ ID NO: 927 is the determined cDNA sequence for clone R0096:E04.

[0967] SEQ ID NO: 928 is the determined cDNA sequence for clone R0096:E05.

[0968] SEQ ID NO: 929 is the determined cDNA sequence for clone R0096:E06.

[0969] SEQ ID NO: 930 is the determined cDNA sequence for clone R0096:E08.

[0970] SEQ ID NO: 931 is the determined cDNA sequence for clone R0096:E09.

[0971] SEQ ID NO: 932 is the determined cDNA sequence for clone R0096:E10.

[0972] SEQ ID NO: 933 is the determined cDNA sequence for clone R0096:E11.

[0973] SEQ ID NO: 934 is the determined cDNA sequence for clone R0096:E 12.

[0974] SEQ ID NO: 935 is the determined cDNA sequence for clone R0096:F01.

[0975] SEQ ID NO: 936 is the determined cDNA sequence for clone R0096:F02.

[0976] SEQ ID NO: 937 is the determined cDNA sequence for clone R0096:F03.

[0977] SEQ ID NO: 938 is the determined cDNA sequence for clone R0096:F04.

[0978] SEQ ID NO: 939 is the determined cDNA sequence for clone R0096:F05.

[0979] SEQ ID NO: 940 is the determined cDNA sequence for clone R0096:F07.

[0980] SEQ ID NO: 941 is the determined cDNA sequence for clone R0096:F10.

[0981] SEQ ID NO: 942 is the determined cDNA sequence for clone R0096:F11.

[0982] SEQ ID NO: 943 is the determined cDNA sequence for clone R0096:G01.

[0983] SEQ ID NO: 944 is the determined cDNA sequence for clone R0096:G03.

[0984] SEQ ID NO: 945 is the determined cDNA sequence for clone R0096:G04.

[0985] SEQ ID NO: 946 is the determined cDNA sequence for clone R0096:G05.

[0986] SEQ ID NO: 947 is the determined cDNA sequence for clone R0096:G06.

[0987] SEQ ID NO: 948 is the determined cDNA sequence for clone R0096:G07.

[0988] SEQ ID NO: 949 is the determined cDNA sequence for clone R0096:G09.

[0989] SEQ ID NO: 950 is the determined cDNA sequence for clone R0096:G10.

[0990] SEQ ID NO: 951 is the determined cDNA sequence for clone R0096:G12.

[0991] SEQ ID NO: 952 is the determined cDNA sequence for clone R0096:H01.

[0992] SEQ ID NO: 953 is the determined cDNA sequence for clone R0096:H02.

[0993] SEQ ID NO: 954 is the determined cDNA sequence for clone R0096:G03.

[0994] SEQ ID NO: 955 is the determined cDNA sequence for clone R0096:H07.

[0995] SEQ ID NO: 956 is the determined cDNA sequence for clone R0096:H08.

[0996] SEQ ID NO: 957 is the determined cDNA sequence for clone R0097:A05.

[0997] SEQ ID NO: 958 is the determined cDNA sequence for clone R0097:A06.

[0998] SEQ ID NO: 959 is the determined cDNA sequence for clone R0097:A10.

[0999] SEQ ID NO: 960 is the determined cDNA sequence for clone R0097:A11.

[1000] SEQ ID NO: 961 is the determined cDNA sequence for clone R0097:B01.

[1001] SEQ ID NO: 962 is the determined cDNA sequence for clone R0097:B03.

[1002] SEQ ID NO: 963 is the determined cDNA sequence for clone R0097:B04.

[1003] SEQ ID NO: 964 is the determined cDNA sequence for clone R0097:B05.

[1004] SEQ ID NO: 965 is the determined cDNA sequence for clone R0097:B06.

[1005] SEQ ID NO: 966 is the determined cDNA sequence for clone R0097:B07.

[1006] SEQ ID NO: 967 is the determined cDNA sequence for clone R0097:B11.

[1007] SEQ ID NO: 968 is the determined cDNA sequence for clone R0097:C01.

[1008] SEQ ID NO: 969 is the determined cDNA sequence for clone R0097:C02.

[1009] SEQ ID NO: 970 is the determined cDNA sequence for clone R0097:C03.

[1010] SEQ ID NO: 971 is the determined cDNA sequence for clone R0097:C04.

[1011] SEQ ID NO: 972 is the determined cDNA sequence for clone R0097:C05.

[1012] SEQ ID NO: 973 is the determined cDNA sequence for clone R0097:C07.

[1013] SEQ ID NO: 974 is the determined cDNA sequence for clone R0097:C08.

[1014] SEQ ID NO: 975 is the determined cDNA sequence for clone R0097:C09.

[1015] SEQ ID NO: 976 is the determined cDNA sequence for clone R0097:C10.

[1016] SEQ ID NO: 977 is the determined cDNA sequence for clone R0097:D01.

[1017] SEQ ID NO: 978 is the determined cDNA sequence for clone R0097:D08.

[1018] SEQ ID NO: 979 is the determined cDNA sequence for clone R0097:E02.

[1019] SEQ ID NO: 980 is the determined cDNA sequence for clone R0097:E09.

[1020] SEQ ID NO: 981 is the determined cDNA sequence for clone R0097:E11.

[1021] SEQ ID NO: 982 is the determined cDNA sequence for clone R0097:F01.

[1022] SEQ ID NO: 983 is the determined cDNA sequence for clone R0097:F11.

[1023] SEQ ID NO: 984 is the determined cDNA sequence for clone R0097: G01.

[1024] SEQ ID NO: 985 is the determined cDNA sequence for clone R0097:G11.

[1025] SEQ ID NO: 986 is the determined cDNA sequence for clone R0097:G12.

[1026] SEQ ID NO: 987 is the determined cDNA sequence for clone R0097:H01.

[1027] SEQ ID NO: 988 is the determined cDNA sequence for clone R0097:H02.

[1028] SEQ ID NO: 989 is the determined cDNA sequence for clone R0097:H04.

[1029] SEQ ID NO: 990 is the determined cDNA sequence for clone R0097:H06.

[1030] SEQ ID NO: 991 is the determined cDNA sequence for clone R0097:H07.

[1031] SEQ ID NO: 992 is the determined cDNA sequence for clone R0097:H09.

[1032] SEQ ID NO: 993 is the determined cDNA sequence for clone R0097:H11.

[1033] SEQ ID NO: 994 is the determined cDNA sequence for clone R0098:A03.

[1034] SEQ ID NO: 995 is the determined cDNA sequence for clone R0098:A05.

[1035] SEQ ID NO: 996 is the determined cDNA sequence for clone R0098:A06.

[1036] SEQ ID NO: 997 is the determined cDNA sequence for clone R0098:A10.

[1037] SEQ ID NO: 998 is the determined cDNA sequence for clone R0098:A12.

[1038] SEQ ID NO: 999 is the determined cDNA sequence for clone R0098:B01.

[1039] SEQ ID NO: 1000 is the determined cDNA sequence for clone R0098:B02.

[1040] SEQ ID NO: 1001 is the determined cDNA sequence for clone R0098:B05.

[1041] SEQ ID NO: 1002 is the determined cDNA sequence for clone R0098:B06.

[1042] SEQ ID NO: 1003 is the determined cDNA sequence for clone R0098:B10.

[1043] SEQ ID NO: 1004 is the determined cDNA sequence for clone R0098:C03.

[1044] SEQ ID NO: 1005 is the determined cDNA sequence for clone R0098:C04.

[1045] SEQ ID NO: 1006 is the determined cDNA sequence for clone R0098:C05.

[1046] SEQ ID NO: 1007 is the determined cDNA sequence for clone R0098:C10.

[1047] SEQ ID NO: 1008 is the determined cDNA sequence for clone R0098:C11.

[1048] SEQ ID NO: 1009 is the determined cDNA sequence for clone R0098:D01.

[1049] SEQ ID NO: 1010 is the determined cDNA sequence for clone R0098:D02.

[1050] SEQ ID NO: 1011 is the determined cDNA sequence for clone R0098:D07.

[1051] SEQ ID NO: 1012 is the determined cDNA sequence for clone R0098:D08.

[1052] SEQ ID NO: 1013 is the determined cDNA sequence for clone R0098:D09.

[1053] SEQ ID NO: 1014 is the determined cDNA sequence for clone R0098:D10.

[1054] SEQ ID NO: 1015 is the determined cDNA sequence for clone R0098:D11.

[1055] SEQ ID NO: 1016 is the determined cDNA sequence for clone R0098:D12.

[1056] SEQ ID NO: 1017 is the determined cDNA sequence for clone R0098:E01.

[1057] SEQ ID NO: 1018 is the determined cDNA sequence for clone R0098:E04.

[1058] SEQ ID NO: 1019 is the determined cDNA sequence for clone R0098:E05.

[1059] SEQ ID NO: 1020 is the determined cDNA sequence for clone R0098:E06.

[1060] SEQ ID NO: 1021 is the determined cDNA sequence for clone R0098:E07.

[1061] SEQ ID NO: 1022 is the determined cDNA sequence for clone R0098:E11.

[1062] SEQ ID NO: 1023 is the determined cDNA sequence for clone R0098:F04.

[1063] SEQ ID NO: 1024 is the determined cDNA sequence for clone R0098:F05.

[1064] SEQ ID NO: 1025 is the determined cDNA sequence for clone R0098:F06.

[1065] SEQ ID NO: 1026 is the determined cDNA sequence for clone R0098:F07.

[1066] SEQ ID NO: 1027 is the determined cDNA sequence for clone R0098:F08.

[1067] SEQ ID NO: 1028 is the determined cDNA sequence for clone R0098:F09.

[1068] SEQ ID NO: 1029 is the determined cDNA sequence for clone R0098:F10.

[1069] SEQ ID NO: 1030 is the determined cDNA sequence for clone R0098:F11.

[1070] SEQ ID NO: 1031 is the determined cDNA sequence for clone R0098:F12.

[1071] SEQ ID NO: 1032 is the determined cDNA sequence for clone R0098:G02.

[1072] SEQ ID NO: 1033 is the determined cDNA sequence for clone R0098:G03.

[1073] SEQ ID NO: 1034 is the determined cDNA sequence for clone R0098:G05.

[1074] SEQ ID NO: 1035 is the determined cDNA sequence for clone R0098:G06.

[1075] SEQ ID NO: 1036 is the determined cDNA sequence for clone R0098:G07.

[1076] SEQ ID NO: 1037 is the determined cDNA sequence for clone R0098:G08.

[1077] SEQ ID NO: 1038 is the determined cDNA sequence for clone R0098:G09.

[1078] SEQ ID NO: 1039 is the determined cDNA sequence for clone R0098:G10.

[1079] SEQ ID NO: 1040 is the determined cDNA sequence for clone R0098:G11.

[1080] SEQ ID NO: 1041 is the determined cDNA sequence for clone R0098:G12.

[1081] SEQ ID NO: 1042 is the determined cDNA sequence for clone R0098:H02.

[1082] SEQ ID NO: 1043 is the determined cDNA sequence for clone R0098:H03.

[1083] SEQ ID NO: 1044 is the determined cDNA sequence for clone R0098:H04.

[1084] SEQ ID NO: 1045 is the determined cDNA sequence for clone R0098:H05.

[1085] SEQ ID NO: 1046 is the determined cDNA sequence for clone R0098:H07.

[1086] SEQ ID NO: 1047 is the determined cDNA sequence for clone R0098:H08.

[1087] SEQ ID NO: 1048 is the determined cDNA sequence for clone R0098:H11.

[1088] SEQ ID NO: 1049 is the determined cDNA sequence for clone C878P which shows sequence similarity to homo sapiens cDNA FLJ10884 fis, clone NT2RP4001950 and homo sapiens cDNA FLJ11111 fis, clone PLACE1005923.

[1089] SEQ ID NO: 1050 is the determined cDNA sequence for clone C882P which shows sequence similarity to homo sapiens cDNA FLJ20116 fis, clone COLO 5655 and homo sapiens cDNA FLJ20740 fis, clone HEP07118.

[1090] SEQ ID NO: 1051 is the determined cDNA sequence for clone C883P which shows sequence similarity to human homeobox protein Cdx2 mRNA.

[1091] SEQ ID NO: 1052 is the determined cDNA sequence for clone C884P which shows sequence similarity to human TM4SF3 (aka, CO-029).

[1092] SEQ ID NO: 1053 is the determined cDNA sequence for clone C886P which shows sequence similarity to human secretory protein (P1.B) mRNA and homo sapiens trefoil factor 3 (intestinal) (TFF3) mRNA.

[1093] SEQ ID NO: 1054 is the determined cDNA sequence for clone C892P which shows sequence similarity to human galectin-4 mRNA.

[1094] SEQ ID NO: 1055 is the determined cDNA sequence for clone C900P which shows sequence similarity to homo sapiens mucin 11 (MUC11) mRNA.

[1095] SEQ ID NO: 1056 is the determined cDNA sequence for clone C902P which shows sequence similarity to homo sapiens calcium-dependent chloride channel-1 (hCLCA1) mRNA.

[1096] SEQ ID NO: 1057 is the determined cDNA sequence for clone C903P which shows sequence similarity to homo sapiens transmembrane mucin 12 (MUC 12) mRNA.

[1097] SEQ ID NO: 1058 is the determined cDNA sequence for clone C899P which shows sequence similarity to homo sapiens intestinal mucin (MUC2) mRNA.

[1098] SEQ ID NO: 1059 is the predicted amino acid sequence for the clone of SEQ ID NO:1049.

[1099] SEQ ID NO:1060 is the predicted amino acid sequence for the clone of SEQ ID NO:1050.

[1100] SEQ ID NO:1061 is the predicted amino acid sequence for the clone of SEQ ID NO:1051.

[1101] SEQ ID NO:1062 is the predicted amino acid sequence for the clone of SEQ ID NO: 1052.

[1102] SEQ ID NO:1063 is the predicted amino acid sequence for the clone of SEQ ID NO: 1053.

[1103] SEQ ID NO:1064 is the predicted amino acid sequence for the clone of SEQ ID NO: 1054.

[1104] SEQ ID NO:1065 is the predicted amino acid sequence for the clone of SEQ ID NO: 1055.

[1105] SEQ ID NO:1066 is the predicted amino acid sequence for the clone of SEQ ID NO:1056.

[1106] SEQ ID NO:1067 is the predicted amino acid sequence for the clone of SEQ ID NO:1057.

[1107] SEQ ID NO:1068 is the predicted amino acid sequence for the clone of SEQ ID NO: 1058.

[1108] SEQ ID NO: 1069 is the full length nucleotide sequence for clone CS1-152 (C880P, C887P).

[1109] SEQ ID NO:1070 is the predicted amino acid sequence for the clone of SEQ ID NO: 1069.

[1110] SEQ ID NO:1071 is the cDNA sequence for human colon specific gene (geneseq X03195) identified from a computer search of the public geneseq database and which shows similarity to clone C880P.

[1111] SEQ ID NO:1072 is the cDNA sequence for human protein comprising secretory signal nucleotide sequence 3 (geneseq V29035) identified from a computer search of the public geneseq database and which shows similarity to clone C880P.

[1112] SEQ ID NO:1073 is the cDNA sequence for open reading frame human protein comprising secretory signal 3 (geneseq V29036) identified from a computer search of the public geneseq database and which shows similarity to clone C880P.

[1113] SEQ ID NO:1074 is the cDNA sequence for human colon specific protein cDNA (geneseq T51784) identified from a computer search of the public geneseq database and which shows similarity to clone C880P.

[1114] SEQ ID NO: 1075 is the cDNA sequence for human Reg 1-gamma protein (geneseq V29156) identified from a computer search of the public geneseq database and which shows similarity to clone C880P.

[1115] SEQ ID NO: 1076 is the cDNA sequence for human intestinal peptide-associated transporter HPT-1 mRNA, complete cds and homo sapiens mRNA for LI-cadherin (geneseq X18166) identified from a computer search of the public geneseq database and which shows similarity to clone C888P.

[1116] SEQ ID NO:1077 is the amino acid sequence of geneseq record W12691 which shows sequence similarity to clone C880P.

[1117] SEQ ID NO:1078 is the amino acid sequence of geneseq record W37866 which shows sequence similarity to clone C880P.

[1118] SEQ ID NO:1079 is the amino acid sequence of geneseq record W37929 which shows sequence similarity to clone C880P.

[1119] SEQ ID NO:1080 is the amino acid sequence of geneseq record W84274 which shows sequence similarity to clone C880P.

[1120] SEQ ID NO:1081 is the amino acid sequence of geneseq record W740898 which shows sequence similarity to clone C888P.

[1121] SEQ ID NO: 1082 is the determined cDNA sequence for clone 27540.

[1122] SEQ ID NO:1083 is the predicted amino acid sequence of clone 27540 (SEQ ID NO:1082).

[1123] SEQ ID NO: 1084 is the determined cDNA sequence for Ra12-C884P-PCRX2.

[1124] SEQ ID NO:1085 the predicted amino acid sequence for Ra12-C884P (SEQ ID NO: 1084).

[1125] SEQ ID NO:1086 the determined cDNA sequence for R.C888P.

[1126] SEQ ID NO: 1087 the predicted amino acid sequence for R.C888P (SEQ ID NO:1086).

[1127] SEQ ID NO:1088 is the PCR primer 080300-A (Primer Identifier 7839) for amplification of C884.

[1128] SEQ ID NO:1089 is the PCR primer 080300-B (Primer Identifier 7840) for amplification of C884.

[1129] SEQ ID NO:1090 is the sense PCR Primer-080300-C (Primer ID7841) for amplification of C888P.

[1130] SEQ ID NO:1091 is the antisense PCR Primer-080300-D (Primer ID7842) for amplification of C888P.

[1131] SEQ ID NO:1092 is the determined cDNA sequence for the RECC gene.

[1132] SEQ ID NO:1093 is the predicted protein sequence encoded by SEQ ID NO:1092.

[1133] SEQ ID NO: 1094 is the full length C799P/THOX2 cDNA sequence.

[1134] SEQ ID NO: 1095 is the full length C799P/THOX2 amino acid sequence that is the amino acid sequence predicted by the ORF contained in SEQ ID NO: 1094.

[1135] SEQ ID NO:1096 is the full length cDNA sequence for Galectin-4, which shows similarity to clone CT-53 (C892P).

[1136] SEQ ID NO:1097 is the full length cDNA sequence for Human SurfaceMarker 1 GPI-anchored, which shows similarity to clone CT-126 (25527).

[1137] SEQ ID NO: 1098 is the full length cDNA sequence for hu.XAG homolog Anterior Gradient Protein, which shows similarity to clone CT-140 (25537).

[1138] SEQ ID NO:1099 is the full length cDNA sequence for hu glucose phosphate isomerase (GPI), which shows similarity to clone CT-148 (25544).

[1139] SEQ ID NO:1100 is the determined cDNA sequence for clone CT2-283 (41103).

[1140] SEQ ID NO:1101 is the full length cDNA sequence for APG-2, which shows similarity to clones CT2-136 (41099) and CT-17 (24115).

[1141] SEQ ID NO: 1102 is the predicted full length protein sequence for APG-2, which shows similarity to clones CT2-136 (41099) and CT-17 (24115).

[1142] SEQ ID NO: 1103 is the full length cDNA sequence for human squalene epoxidase, which shows similarity to clone CS 1-104 (31409).

[1143] SEQ ID NO: 1104 is the full length cDNA sequence for human Mad2, which shows similarity to clone CS-106 (31364).

[1144] SEQ ID NO: 1105 is the full length cDNA sequence for epithelial-specific transcription factor, which shows similarity to clone CS1-123 (31396).

[1145] SEQ ID NO:1106 is the full length cDNA sequence for KSA, Adenocarcinoma-associated antigen, which shows similarity to clone CS1-160 (32222).

[1146] SEQ ID NO:1107 is the predicted protein sequence encoded by SEQ ID NO: 1103.

[1147] SEQ ID NO: 1108 is the predicted protein sequence encoded by SEQ ID NO: 1104.

[1148] SEQ ID NO:1109 is the predicted protein sequence encoded by SEQ ID NO:1105.

[1149] SEQ ID NO: 1110 is the predicted protein sequence encoded by SEQ ID NO: 1106.

[1150] SEQ ID NO: 1111 is the full length cDNA sequence for Hu.Keratin19, which shows similarity to clone CT2-167.

[1151] SEQ ID NO: 1112 is the full length EDNA sequence for Hu.IgG Fc-binding protein (FC(GAMMA)BP), which shows similarity to clone CT2-147 (41100).

[1152] SEQ ID NO: 1113 is the full length cDNA sequence for murine Valosin-containing protein, which shows similarity to clone CT2-222 (39848).

[1153] SEQ ID NO: 1114 is the full length cDNA sequence for human Valosin-containing protein, which shows similarity to clone CT2-222 (39848).

[1154] SEQ ID NO: 1115 is the predicted protein sequence encoded by SEQ ID NO:1111.

[1155] SEQ ID NO: 1161 is the predicted protein sequence encoded by SEQ ID NO: 1112.

[1156] SEQ ID NO: 1117 is the predicted protein sequence encoded by SEQ ID NO:1113.

[1157] SEQ ID NO: 1118 is the predicted protein sequence encoded by SEQ ID NO: 1114.

[1158] SEQ ID NO: 1119 is the determined cDNA sequence for MAPS-C884P.

[1159] SEQ ID NO:1120 is the determined cDNA sequence C884P-HisTag.

[1160] SEQ ID NO: 1121 is the predicted protein sequence encoded by SEQ ID NO: 1119.

[1161] SEQ ID NO:1122 is the predicted protein sequence encoded by SEQ ID NO:1120.

[1162] SEQ ID NO:1123 is the C884P-HisTag-AW175 sense PCR primer.

[1163] SEQ ID NO:1124 is the C884P-HisTag-AW176 antisense PCR primer.

[1164] SEQ ID NO:1125 is the determined full-length cDNA sequence for CT2-283.

[1165] SEQ ID NO:1126 is the predicted amino acid sequence for ORF1 of CT2-283.

[1166] SEQ ID NO:1127 is the predicted amino acid sequence for ORF2 of CT2-283.

[1167] SEQ ID NO: 1128 is the predicted amino acid sequence for ORF3 of CT2-283.

[1168] SEQ ID NO:1129 is the predicted amino acid sequence for ORF4 of CT2-283.

### DETAILED DESCRIPTION OF THE INVENTION

[1169] As noted above, the present invention is generally directed to compositions and methods for the therapy and diagnosis of cancer, such as colon cancer. The compositions described herein may include colon tumor polypeptides, polynucleotides encoding such polypeptides, binding agents such as antibodies, antigen presenting cells (APCs) and/or immune system cells (e g., T cells). Polypeptides of the present invention generally comprise at least a portion (such as an immunogenic portion) of a colon tumor protein or a variant thereof. A “colon tumor protein” is a protein that is expressed in colon tumor cells at a level that is at least two fold, and preferably at least five fold, greater than the level of expression in a normal tissue, as determined using a representative assay provided herein. Certain colon tumor proteins are tumor proteins that react detectably (within an immunoassay, such as an ELISA or Western blot) with antisera of a patient afflicted with colon cancer. Polynucleotides of the subject invention generally comprise a DNA or RNA sequence that encodes all or a portion of such a polypeptide, or that is complementary to such a sequence. Antibodies are generally immune system proteins, or antigen-binding fragments thereof, that are capable of binding to a polypeptide as described above. Antigen presenting cells include dendritic cells, macrophages, monocytes, fibroblasts and B-cells that express a polypeptide as described above. T cells that may be employed within such compositions are generally T cells that are specific for a polypeptide as described above.

[1170] The present invention is based on the discovery of human colon tumor proteins. Sequences of polynucleotides encoding specific tumor proteins are provided in SEQ ID NO: 1-121, 123-197, 205-630, 632-684, 686, 690-691, 694-1058, 1069, 1071-1076, 1082, 1084, 1086, 1092, 1094, 1096-1101, 1103-1106, 1111-1114, 1119, 1120, and 1125.

[1171] Colon Tumor Protein Polynucleotides

[1172] Any polynucleotide that encodes a colon tumor protein or a portion or other variant thereof as described herein is encompassed by the present invention. Preferred polynucleotides comprise at least 15 consecutive nucleotides, preferably at least 30 consecutive nucleotides and more preferably at least 45 consecutive nucleotides, that encode a portion of a colon tumor protein. More preferably, a polynucleotide encodes an immunogenic portion of a colon tumor protein. Polynucleotides complementary to any such sequences are also encompassed by the present invention. Polynucleotides may be single-stranded (coding or antisense) or double-stranded, and may be DNA (genomic, cDNA or synthetic) or RNA molecules. RNA molecules include HnRNA molecules, which contain introns and correspond to a DNA molecule in a one-to-one manner, and mRNA molecules, which do not contain introns. Additional coding or non-coding sequences may, but need not, be present within a polynucleotide of the present invention, and a polynucleotide may, but need not, be linked to other molecules and/or support materials.

[1173] Polynucleotides may comprise a native sequence (i.e., an endogenous sequence that encodes a colon tumor protein or a portion thereof) or may comprise a variant of such a sequence. Polynucleotide variants may contain one or more substitutions, additions, deletions and/or insertions such that the immunogenicity of the encoded polypeptide is not diminished, relative to a native tumor protein. The effect on the immunogenicity of the encoded polypeptide may generally be assessed as described herein. Variants preferably exhibit at least about 70% identity, more preferably at least about 80% identity and most preferably at least about 90% identity to a polynucleotide sequence that encodes a native colon tumor protein or a portion thereof.

[1174] Two polynucleotide or polypeptide sequences are said to be “identical” if the sequence of nucleotides or amino acids in the two sequences is the same when aligned for maximum correspondence as described below. Comparisons between two sequences are typically performed by comparing the sequences over a comparison window to identify and compare local regions of sequence similarity. A “comparison window” as used herein, refers to a segment of at least about 20 contiguous positions, usually 30 to about 75, in which a sequence may be compared to a reference sequence of the same number of contiguous positions after the two sequences are optimally aligned.

[1175] Optimal alignment of sequences for comparison may be conducted using the Megalign program in the Lasergene suite of bioinformatics software (DNASTAR, Inc., Madison, Wis.), using default parameters. This program embodies several alignment schemes described in the following references: Dayhoff, M. O. (1978) A model of evolutionary change in proteins—Matrices for detecting distant relationships. In Dayhoff, M. O. (ed.) Atlas of Protein Sequence and Structure, National Biomedical Research Foundation, Washington D.C. Vol. 5, Suppl. 3, pp. 345-358; Hein J. (1990) Unified Approach to Alignment and Phylogenes pp. 626-645 Methods in Enzymology vol. 183, Academic Press, Inc., San Diego, Calif.; Higgins, D. G. and Sharp, P. M. (1989) CABIOS 5:151-153; Myers, E. W. and Muller W. (1988) CABIOS 4:11-17; Robinson, E. D. (1971) Comb. Theor 11:105; Santou, N. Nes, M. (1987) Mol. Biol. Evol. 4:406-425; Sneath, P. H. A. and Sokal, R. R. (1973) Numerical Taxonomy—the Principles and Practice of Numerical Taxonomy, Freeman Press, San Francisco, Calif.; Wilbur, W. J. and Lipman, D. J. (1983) Proc. Natl. Acad., Sci. USA 80:726-730.

[1176] Preferably, the “percentage of sequence identity” is determined by comparing two optimally aligned sequences over a window of comparison of at least 20 positions, wherein the portion of the polynucleotide or polypeptide sequence in the comparison window may comprise additions or deletions (i.e. gaps) of 20 percent or less, usually 5 to 15 percent, or 10 to 12 percent, as compared to the reference sequence (which does not comprise additions or deletions) for optimal alignment of the two sequences. The percentage is calculated by determining the number of positions at which the identical nucleic acid bases or amino acid residue occurs in both sequences to yield the number of matched positions, dividing the number of matched positions by the total number of positions in the reference sequence (i.e. the window size) and multiplying the results by 100 to yield the percentage of sequence identity.

[1177] Variants may also, or alternatively, be substantially homologous to a native gene, or a portion or complement thereof. Such polynucleotide variants are capable of hybridizing under moderately stringent conditions to a naturally occurring DNA sequence encoding a native colon tumor protein (or a complementary sequence). Suitable moderately stringent conditions include prewashing in a solution of 5× SSC, 0.5% SDS, 1.0 mM EDTA (pH 8.0); hybridizing at 50° C.-65° C., 5× SSC, overnight; followed by washing twice at 65° C. for 20 minutes with each of 2×, 0.5× and 0.2× SSC containing 0.1% SDS.

[1178] It will be appreciated by those of ordinary skill in the art that, as a result of the degeneracy of the genetic code, there are many nucleotide sequences that encode a polypeptide as described herein. Some of these polynucleotides bear minimal homology to the nucleotide sequence of any native gene. Nonetheless, polynucleotides that vary due to differences in codon usage are specifically contemplated by the present invention. Further, alleles of the genes comprising the polynucleotide sequences provided herein are within the scope of the present invention. Alleles are endogenous genes that are altered as a result of one or more mutations, such as deletions, additions and/or substitutions of nucleotides. The resulting mRNA and protein may, but need not, have an altered structure or function. Alleles may be identified using standard techniques (such as hybridization, amplification and/or database sequence comparison).

[1179] Polynucleotides may be prepared using any of a variety of techniques. For example, a polynucleotide may be identified, as described in more detail below, by screening a microarray of cDNAs for tumor-associated expression (i.e., expression that is at least two fold greater in a colon tumor than in normal tissue, as determined using a representative assay provided herein). Such screens may be performed using a Synteni microarray (Palo Alto, Calif.) according to the manufacturer's instructions (and essentially as described by Schena et al., Proc. Natl. Acad. Sci. USA 93:10614-10619, 1996 and Heller et al., Proc. Natl. Acad. Sci. USA 94:2150-2155, 1997). Alternatively, polypeptides may be amplified from cDNA prepared from cells expressing the proteins described herein, such as colon tumor cells. Such polynucleotides may be amplified via polymerase chain reaction (PCR). For this approach, sequence-specific primers may be designed based on the sequences provided herein, and may be purchased or synthesized.

[1180] An amplified portion may be used to isolate a full length gene from a suitable library (e.g., a colon tumor cDNA library) using well known techniques. Within such techniques, a library (cDNA or genomic) is screened using one or more polynucleotide probes or primers suitable for amplification. Preferably, a library is size-selected to include larger molecules. Random primed libraries may also be preferred for identifying 5′ and upstream regions of genes. Genomic libraries are preferred for obtaining introns and extending 5′ sequences.

[1181] For hybridization techniques, a partial sequence may be labeled (e.g., by nick-translation or end-labeling with ³²P) using well known techniques. A bacterial or bacteriophage library is then screened by hybridizing filters containing denatured bacterial colonies (or lawns containing phage plaques) with the labeled probe (see Sambrook et al., Molecular Cloning: A Laboratory Manual, Cold Spring Harbor Laboratories, Cold Spring Harbor, N.Y., 1989). Hybridizing colonies or plaques are selected and expanded, and the DNA is isolated for further analysis. cDNA clones may be analyzed to determine the amount of additional sequence by, for example, PCR using a primer from the partial sequence and a primer from the vector. Restriction maps and partial sequences may be generated to identify one or more overlapping clones. The complete sequence may then be determined using standard techniques, which may involve generating a series of deletion clones. The resulting overlapping sequences are then assembled into a single contiguous sequence. A full length cDNA molecule can be generated by ligating suitable fragments, using well known techniques.

[1182] Alternatively, there are numerous amplification techniques for obtaining a full length coding sequence from a partial cDNA sequence. Within such techniques, amplification is generally performed via PCR. Any of a variety of commercially available kits may be used to perform the amplification step. Primers may be designed using, for example, software well known in the art. Primers are preferably 22-30 nucleotides in length, have a GC content of at least 50% and anneal to the target sequence at temperatures of about 68° C. to 72° C. The amplified region may be sequenced as described above, and overlapping sequences assembled into a contiguous sequence.

[1183] One such amplification technique is inverse PCR (see Triglia et al., Nucl. Acids Res. 16:8186, 1988), which uses restriction enzymes to generate a fragment in the known region of the gene. The fragment is then circularized by intramolecular ligation and used as a template for PCR with divergent primers derived from the known region. Within an alternative approach, sequences adjacent to a partial sequence may be retrieved by amplification with a primer to a linker sequence and a primer specific to a known region. The amplified sequences are typically subjected to a second round of amplification with the same linker primer and a second primer specific to the known region. A variation on this procedure, which employs two primers that initiate extension in opposite directions from the known sequence, is described in WO 96/38591. Another such technique is known as “rapid amplification of cDNA ends” or RACE. This technique involves the use of an internal primer and an external primer, which hybridizes to a polyA region or vector sequence, to identify sequences that are 5′ and 3′ of a known sequence. Additional techniques include capture PCR (Lagerstrom et al., PCR Methods Applic. 1:111-19, 1991) and walking PCR (Parker et al., Nucl. Acids Res. 19:3055-60, 1991). Other methods employing amplification may also be employed to obtain a full length cDNA sequence.

[1184] In certain instances, it is possible to obtain a full length cDNA sequence by analysis of sequences provided in an expressed sequence tag (EST) database, such as that available from GenBank. Searches for overlapping ESTs may generally be performed using well known programs (e.g., NCBI BLAST searches), and such ESTs may be used to generate a contiguous full length sequence.

[1185] Certain nucleic acid sequences of cDNA molecules encoding portions of colon tumor proteins are provided in SEQ ID NO: 1-121, 123-197, 205-630, 632-684, 686, 690-691, 694-1058, 1069, 1071-1076, 1082, 1084, 1086, 1092, 1094, 1096-1101, 1103-1106, 1111-1114, 1119, 1120, and 1125. These polynucleotides were isolated from colon tumor cDNA libraries using conventional and/or PCR-based subtraction techniques, as described below.

[1186] Polynucleotide variants may generally be prepared by any method known in the art, including chemical synthesis by, for example, solid phase phosphoramidite chemical synthesis. Modifications in a polynucleotide sequence may also be introduced using standard mutagenesis techniques, such as oligonucleotide-directed site-specific mutagenesis (see Adelman et al., DNA 2:183, 1983). Alternatively, RNA molecules may be generated by in vitro or in vivo transcription of DNA sequences encoding a colon tumor protein, or portion thereof, provided that the DNA is incorporated into a vector with a suitable RNA polymerase promoter (such as T7 or SP6). Certain portions may be used to prepare an encoded polypeptide, as described herein. In addition, or alternatively, a portion may be administered to a patient such that the encoded polypeptide is generated in vivo (e.g., by transfecting antigen-presenting cells, such as dendritic cells, with a cDNA construct encoding a colon tumor polypeptide, and administering the transfected cells to the patient).

[1187] A portion of a sequence complementary to a coding sequence (i.e., an antisense polynucleotide) may also be used as a probe or to modulate gene expression. cDNA constructs that can be transcribed into antisense RNA may also be introduced into cells of tissues to facilitate the production of antisense RNA. An antisense polynucleotide may be used, as described herein, to inhibit expression of a tumor protein. Antisense technology can be used to control gene expression through triple-helix formation, which compromises the ability of the double helix to open sufficiently for the binding of polymerases, transcription factors or regulatory molecules (see Gee et al., In Huber and Carr, Molecular and Immunologic Approaches, Futura Publishing Co. (Mt. Kisco, N.Y.; 1994)). Alternatively, an antisense molecule may be designed to hybridize with a control region of a gene (e.g., promoter, enhancer or transcription initiation site), and block transcription of the gene; or to block translation by inhibiting binding of a transcript to ribosomes.

[1188] A portion of a coding sequence, or of a complementary sequence, may also be designed as a probe or primer to detect gene expression. Probes may be labeled with a variety of reporter groups, such as radionuclides and enzymes, and are preferably at least 10 nucleotides in length, more preferably at least 20 nucleotides in length and still more preferably at least 30 nucleotides in length. Primers, as noted above, are preferably 22-30 nucleotides in length.

[1189] Any polynucleotide may be further modified to increase stability in vivo. Possible modifications include, but are not limited to, the addition of flanking sequences at the 5′ and/or 3′ ends; the use of phosphorothioate or 2′ O-methyl rather than phosphodiesterase linkages in the backbone; and/or the inclusion of nontraditional bases such as inosine, queosine and wybutosine, as well as acetyl- methyl-, thio- and other modified forms of adenine, cytidine, guanine, thymine and uridine.

[1190] Nucleotide sequences as described herein may be joined to a variety of other nucleotide sequences using established recombinant DNA techniques. For example, a polynucleotide may be cloned into any of a variety of cloning vectors, including plasmids, phagemids, lambda phage derivatives and cosmids. Vectors of particular interest include expression vectors, replication vectors, probe generation vectors and sequencing vectors. In general, a vector will contain an origin of replication functional in at least one organism, convenient restriction endonuclease sites and one or more selectable markers. Other elements will depend upon the desired use, and will be apparent to those of ordinary skill in the art.

[1191] Within certain embodiments, polynucleotides may be formulated so as to permit entry into a cell of a mammal, and expression therein. Such formulations are particularly useful for therapeutic purposes, as described below. Those of ordinary skill in the art will appreciate that there are many ways to achieve expression of a polynucleotide in a target cell, and any suitable method may be employed. For example, a polynucleotide may be incorporated into a viral vector such as, but not limited to, adenovirus, adeno-associated virus, retrovirus, or vaccinia or other pox virus (e.g. avian pox virus). Techniques for incorporating DNA into such vectors are well known to those of ordinary skill in the art. A retroviral vector may additionally transfer or incorporate a gene for a selectable marker (to aid in the identification or selection of transduced cells) and/or a targeting moiety, such as a gene that encodes a ligand for a receptor on a specific target cell, to render the vector target specific. Targeting may also be accomplished using an antibody, by methods known to those of ordinary skill in the art.

[1192] Other formulations for therapeutic purposes include colloidal dispersion systems, such as macromolecule complexes, nanocapsules, microspheres, beads, and lipid-based systems including oil-in-water emulsions, micelles, mixed micelles, and liposomes. A preferred colloidal system for use as a delivery vehicle in vitro and in vivo is a liposome (i.e., an artificial membrane vesicle). The preparation and use of such systems is well known in the art.

[1193] Colon Tumor Polypeptides

[1194] Within the context of the present invention, polypeptides may comprise at least an immunogenic portion of a colon tumor protein or a variant thereof, as described herein. As noted above, a “colon tumor protein” is a protein that is expressed by colon tumor cells. Proteins that are colon tumor proteins also react detectably within an immunoassay (such as an ELISA) with antisera from a patient with colon cancer. Polypeptides as described herein may be of any length. Additional sequences derived from the native protein and/or heterologous sequences may be present, and such sequences may (but need not) possess further immunogenic or antigenic properties.

[1195] An “immunogenic portion,” as used herein is a portion of a protein that is recognized (i.e., specifically bound) by a B-cell and/or T-cell surface antigen receptor. Such immunogenic portions generally comprise at least 5 amino acid residues, more preferably at least 10, and still more preferably at least 20 amino acid residues of a colon tumor protein or a variant thereof. Certain preferred immunogenic portions include peptides in which an N-terminal leader sequence and/or transmembrane domain have been deleted. Other preferred immunogenic portions may contain a small N- and/or C-terminal deletion (e.g., 1-30 amino acids, preferably 5-15 amino acids), relative to the mature protein.

[1196] Immunogenic portions may generally be identified using well known techniques, such as those summarized in Paul, Fundamental Immunology, 3rd ed., 243-247 (Raven Press, 1993) and references cited therein. Such techniques include screening polypeptides for the ability to react with antigen-specific antibodies, antisera and/or T-cell lines or clones. As used herein, antisera and antibodies are “antigen-specific” if they specifically bind to an antigen (i.e., they react with the protein in an ELISA or other immunoassay, and do not react detectably with unrelated proteins). Such antisera and antibodies may be prepared as described herein, and using well known techniques. An immunogenic portion of a native colon tumor protein is a portion that reacts with such antisera and/or T-cells at a level that is not substantially less than the reactivity of the full length polypeptide (e.g., in an ELISA and/or T-cell reactivity assay). Such immunogenic portions may react within such assays at a level that is similar to or greater than the reactivity of the full length polypeptide. Such screens may generally be performed using methods well known to those of ordinary skill in the art, such as those described in Harlow and Lane, Antibodies: A Laboratory Manual, Cold Spring Harbor Laboratory, 1988. For example, a polypeptide may be immobilized on a solid support and contacted with patient sera to allow binding of antibodies within the sera to the immobilized polypeptide. Unbound sera may then be removed and bound antibodies detected using, for example, ¹²¹I-labeled Protein A.

[1197] As noted above, a composition may comprise a variant of a native colon tumor protein. A polypeptide “variant,” as used herein, is a polypeptide that differs from a native colon tumor protein in one or more substitutions, deletions, additions and/or insertions, such that the immunogenicity of the polypeptide is not substantially diminished. In other words, the ability of a variant to react with antigen-specific antisera may be enhanced or unchanged, relative to the native protein, or may be diminished by less than 50%, and preferably less than 20%, relative to the native protein. Such variants may generally be identified by modifying one of the above polypeptide sequences and evaluating the reactivity of the modified polypeptide with antigen-specific antibodies or antisera as described herein. Preferred variants include those in which one or more portions, such as an N-terminal leader sequence or transmembrane domain, have been removed. Other preferred variants include variants in which a small portion (e.g., 1-30 amino acids, preferably 5-15 amino acids) has been removed from the N- and/or C-terminal of the mature protein.

[1198] Polypeptide variants preferably exhibit at least about 70%, more preferably at least about 90% and most preferably at least about 95% identity (determined as described above) to the identified polypeptides.

[1199] Preferably, a variant contains conservative substitutions. A “conservative substitution” is one in which an amino acid is substituted for another amino acid that has similar properties, such that one skilled in the art of peptide chemistry would expect the secondary structure and hydropathic nature of the polypeptide to be substantially unchanged. Amino acid substitutions may generally be made on the basis of similarity in polarity, charge, solubility, hydrophobicity, hydrophilicity and/or the amphipathic nature of the residues. For example, negatively charged amino acids include aspartic acid and glutamic acid; positively charged amino acids include lysine and arginine; and amino acids with uncharged polar head groups having similar hydrophilicity values include leucine, isoleucine and valine; glycine and alanine; asparagine and glutamine; and serine, threonine, phenylalanine and tyrosine. Other groups of amino acids that may represent conservative changes include: (1) ala, pro, gly, glu, asp, gln, asn, ser, thr; (2) cys, ser, tyr, thr; (3) val, ile, leu, met, ala, phe; (4) lys, arg, his; and (5) phe, tyr, trp, his. A variant may also, or alternatively, contain non-conservative changes. In a preferred embodiment, variant polypeptides differ from a native sequence by substitution, deletion or addition of five amino acids or fewer. Variants may also (or alternatively) be modified by, for example, the deletion or addition of amino acids that have minimal influence on the immunogenicity, secondary structure and hydropathic nature of the polypeptide.

[1200] As noted above, polypeptides may comprise a signal (or leader) sequence at the N-terminal end of the protein which co-translationally or post-translationally directs transfer of the protein. The polypeptide may also be conjugated to a linker or other sequence for ease of synthesis, purification or identification of the polypeptide (e.g., poly-His), or to enhance binding of the polypeptide to a solid support. For example, a polypeptide may be conjugated to an immunoglobulin Fe region.

[1201] Polypeptides may be prepared using any of a variety of well known techniques. Recombinant polypeptides encoded by DNA sequences as described above may be readily prepared from the DNA sequences using any of a variety of expression vectors known to those of ordinary skill in the art. Expression may be achieved in any appropriate host cell that has been transformed or transfected with an expression vector containing a DNA molecule that encodes a recombinant polypeptide. Suitable host cells include prokaryotes, yeast and higher eukaryotic cells. Preferably, the host cells employed are E. coli, yeast or a mammalian cell line such as COS or CHO. Supernatants from suitable host/vector systems which secrete recombinant protein or polypeptide into culture media may be first concentrated using a commercially available filter. Following concentration, the concentrate may be applied to a suitable purification matrix such as an affinity matrix or an ion exchange resin. Finally, one or more reverse phase HPLC steps can be employed to further purify a recombinant polypeptide.

[1202] Portions and other variants having fewer than about 100 amino acids, and generally fewer than about 50 amino acids, may also be generated by synthetic means, using techniques well known to those of ordinary skill in the art. For example, such polypeptides may be synthesized using any of the commercially available solid-phase techniques, such as the Merrifield solid-phase synthesis method, where amino acids are sequentially added to a growing amino acid chain. See Merrifield, J. Am. Chem. Soc. 85:2149-2146, 1963. Equipment for automated synthesis of polypeptides is commercially available from suppliers such as Perkin Elmer/Applied BioSystems Division (Foster City, Calif.), and may be operated according to the manufacturer's instructions.

[1203] Within certain specific embodiments, a polypeptide may be a fusion protein that comprises multiple polypeptides as described herein, or that comprises at least one polypeptide as described herein and an unrelated sequence, such as a known tumor protein. A fusion partner may, for example, assist in providing T helper epitopes (an immunological fusion partner), preferably T helper epitopes recognized by humans, or may assist in expressing the protein (an expression enhancer) at higher yields than the native recombinant protein. Certain preferred fusion partners are both immunological and expression enhancing fusion partners. Other fusion partners may be selected so as to increase the solubility of the protein or to enable the protein to be targeted to desired intracellular compartments. Still further fusion partners include affinity tags, which facilitate purification of the protein.

[1204] Fusion proteins may generally be prepared using standard techniques, including chemical conjugation. Preferably, a fusion protein is expressed as a recombinant protein, allowing the production of increased levels, relative to a non-fused protein, in an expression system. Briefly, DNA sequences encoding the polypeptide components may be assembled separately, and ligated into an appropriate expression vector. The 3′ end of the DNA sequence encoding one polypeptide component is ligated, with or without a peptide linker, to the 5′ end of a DNA sequence encoding the second polypeptide component so that the reading frames of the sequences are in phase. This permits translation into a single fusion protein that retains the biological activity of both component polypeptides.

[1205] A peptide linker sequence may be employed to separate the first and the second polypeptide components by a distance sufficient to ensure that each polypeptide folds into its secondary and tertiary structures. Such a peptide linker sequence is incorporated into the fusion protein using standard techniques well known in the art. Suitable peptide linker sequences may be chosen based on the following factors: (1) their ability to adopt a flexible extended conformation; (2) their inability to adopt a secondary structure that could interact with functional epitopes on the first and second polypeptides; and (3) the lack of hydrophobic or charged residues that might react with the polypeptide functional epitopes. Preferred peptide linker sequences contain Gly, Asn and Ser residues. Other near neutral amino acids, such as Thr and Ala may also be used in the linker sequence. Amino acid sequences which may be usefully employed as linkers include those disclosed in Maratea et al., Gene 40:39-46, 1985; Murphy et al., Proc. Natl. Acad. Sci. USA 83:8258-8262, 1986; U.S. Pat. No. 4,935,233 and U.S. Pat. No. 4,751,180. The linker sequence may generally be from 1 to about 50 amino acids in length. Linker sequences are not required when the first and second polypeptides have non-essential N-terminal amino acid regions that can be used to separate the functional domains and prevent steric interference.

[1206] The ligated DNA sequences are operably linked to suitable transcriptional or translational regulatory elements. The regulatory elements responsible for expression of DNA are located only 5′ to the DNA sequence encoding the first polypeptides. Similarly, stop codons required to end translation and transcription termination signals are only present 3′ to the DNA sequence encoding the second polypeptide.

[1207] Fusion proteins are also provided that comprise a polypeptide of the present invention together with an unrelated immunogenic protein. Preferably the immunogenic protein is capable of eliciting a recall response. Examples of such proteins include tetanus, tuberculosis and hepatitis proteins (see, for example, Stoute et al. New Engl. J. Med., 336:86-91, 1997).

[1208] Within preferred embodiments, an immunological fusion partner is derived from protein D, a surface protein of the gram-negative bacterium Haemophilus influenza B (WO 91/18926). Preferably, a protein D derivative comprises approximately the first third of the protein (e.g., the first N-terminal 100-110 amino acids), and a protein D derivative may be lipidated. Within certain preferred embodiments, the first 109 residues of a Lipoprotein D fusion partner is included on the N-terminus to provide the polypeptide with additional exogenous T-cell epitopes and to increase the expression level in E. coli (thus functioning as an expression enhancer). The lipid tail ensures optimal presentation of the antigen to antigen presenting cells. Other fusion partners include the non-structural protein from influenzae virus, NS1 (hemaglutinin). Typically, the N-terminal 81 amino acids are used, although different fragments that include T-helper epitopes may be used.

[1209] In another embodiment, the immunological fusion partner is the protein known as LYTA, or a portion thereof (preferably a C-terminal portion). LYTA is derived from Streptococcus pneumoniae, which synthesizes an N-acetyl-L-alanine amidase known as amidase LYTA (encoded by the LytA gene; Gene 43:265-292, 1986). LYTA is an autolysin that specifically degrades certain bonds in the peptidoglycan backbone. The C-terminal domain of the LYTA protein is responsible for the affinity to the choline or to some choline analogues such as DEAE. This property has been exploited for the development of E. coli C-LYTA expressing plasmids useful for expression of fusion proteins. Purification of hybrid proteins containing the C-LYTA fragment at the amino terminus has been described (see Biotechnology 10:795-798, 1992). Within a preferred embodiment, a repeat portion of LYTA may be incorporated into a fusion protein. A repeat portion is found in the C-terminal region starting at residue 178. A particularly preferred repeat portion incorporates residues 188-305.

[1210] In another embodiment, a Mycobacterium tuberculosis-derived Ra12 polynucleotide is linked to at least an immunogenic portion of a polynucleotide of this invention. Ra12 compositions and methods for their use in enhancing expression of heterologous polynucleotide sequences is described in U.S. Patent Application 60/158,585, the disclosure of which is incorporated herein by reference in its entirety. Briefly, Ra12 refers to a polynucleotide region that is a subsequence of a Mycobacterium tuberculosis MTB32A nucleic acid. MTB32A is a serine protease of 32 KD molecular weight encoded by a gene in virulent and avirulent strains of M. tuberculosis. The nucleotide sequence and amino acid sequence of MTB32A have been described (for example, U.S. Patent Application 60/158,585; see also, Skeiky et al., Infection and Immun. (1999) 67:3998-4007, incorporated herein by reference). Surprisingly, it was discovered that a 14 KD C-terminal fragment of the MTB32A coding sequence expresses at high levels on its own and remains as a soluble protein throughout the purification process. Moreover, Ra12 may enhance the immunogenicity of heterologous antigenic polypeptides with which it is fused. This 14 KD C-terminal fragment of the MTB32A is referred herein as Ra12 and represents a fragment comprising some or all of amino acid residues 192 to 323 of MTB32A.

[1211] Recombinant nucleic acids, which encode a fusion polypeptide comprising a Ra12 polypeptide and a heterologous colon tumor polypeptide of interest, can be readily constructed by conventional genetic engineering techniques. Recombinant nucleic acids are constructed so that, preferably, a Ra12 polynucleotide sequence is located 5′ to a selected heterologous colon tumor polynucleotide sequence. It may also be appropriate to place a Ra12 polynucleotide sequence 3′ to a selected heterologous polynucleotide sequence or to insert a heterologous polynucleotide sequence into a site within a Ra12 polynucleotide sequence.

[1212] In addition, any suitable polynucleotide that encodes a Ra12 or a portion or other variant thereof can be used in constructing recombinant fusion polynucleotides comprising Ra12 and one or more colon tumor polynucleotides disclosed herein. Preferred Ra12 polynucleotides generally comprise at least about 15 consecutive nucleotides, at least about 30 nucleotides, at least about 60 nucleotides, at least about 100 nucleotides, at least about 200 nucleotides, or at least about 300 nucleotides that encode a portion of a Ra12 polypeptide.

[1213] Ra12 polynucleotides may comprise a native sequence (i.e., an endogenous sequence that encodes a Ra12 polypeptide or a portion thereof) or may comprise a variant of such a sequence. Ra12 polynucleotide variants may contain one or more substitutions, additions, deletions and/or insertions such that the biological activity of the encoded fusion polypeptide is not substantially diminished, relative to a fusion polypeptide comprising a native Ra12 polypeptide. Variants preferably exhibit at least about 70% identity, more preferably at least about 80% identity and most preferably at least about 90% identity to a polynucleotide sequence that encodes a native Ra12 polypeptide or a portion thereof.

[1214] In another embodiment, the immunological fusion partner is the protein known as MAPS (or MAPS-1A antigen), or a portion thereof. MAPS is derived from the bacterium, Leishmania major and is described in U.S. patent application Nos. 09/183, 861 and 09/874,923, the disclosures of which are incorporated herein by reference in their entirety.

[1215] Recombinant nucleic acids, which encode a fusion polypeptide comprising a MAPS polypeptide and a heterologous colon tumor polypeptide of interest, can be readily constructed by conventional genetic engineering techniques. Recombinant nucleic acids are constructed so that, preferably, a MAPS polynucleotide sequence is located 5′ to a selected heterologous colon tumor polynucleotide sequence. It may also be appropriate to place a MAPS polynucleotide sequence 3′ to a selected heterologous polynucleotide sequence or to insert a heterologous polynucleotide sequence into a site within a MAPS polynucleotide sequence.

[1216] In general, polypeptides (including fusion proteins) and polynucleotides as described herein are isolated. An “isolated” polypeptide or polynucleotide is one that is removed from its original environment. For example, a naturally-occurring protein is isolated if it is separated from some or all of the coexisting materials in the natural system. Preferably, such polypeptides are at least about 90% pure, more preferably at least about 95% pure and most preferably at least about 99% pure. A polynucleotide is considered to be isolated if, for example, it is cloned into a vector that is not a part of the natural environment.

[1217] Binding Agents

[1218] The present invention further provides agents, such as antibodies and antigen-binding fragments thereof, that specifically bind to a colon tumor protein. As used herein, an antibody, or antigen-binding fragment thereof, is said to “specifically bind” to a colon tumor protein if it reacts at a detectable level (within, for example, an ELISA) with a colon tumor protein, and does not react detectably with unrelated proteins under similar conditions. As used herein, “binding” refers to a noncovalent association between two separate molecules such that a complex is formed. The ability to bind may be evaluated by, for example, determining a binding constant for the formation of the complex. The binding constant is the value obtained when the concentration of the complex is divided by the product of the component concentrations. In general, two compounds are said to “bind,” in the context of the present invention, when the binding constant for complex formation exceeds about 103 L/mol. The binding constant may be determined using methods well known in the art.

[1219] Binding agents may be further capable of differentiating between patients with and without a cancer, such as colon cancer, using the representative assays provided herein. In other words, antibodies or other binding agents that bind to a colon tumor protein will generate a signal indicating the presence of a cancer in at least about 20% of patients with the disease, and will generate a negative signal indicating the absence of the disease in at least about 90% of individuals without the cancer. To determine whether a binding agent satisfies this requirement, biological samples (e.g., blood, sera, sputum, urine and/or tumor biopsies) from patients with and without a cancer (as determined using standard clinical tests) may be assayed as described herein for the presence of polypeptides that bind to the binding agent. It will be apparent that a statistically significant number of samples with and without the disease should be assayed. Each binding agent should satisfy the above criteria; however, those of ordinary skill in the art will recognize that binding agents may be used in combination to improve sensitivity.

[1220] Any agent that satisfies the above requirements may be a binding agent. For example, a binding agent may be a ribosome, with or without a peptide component, an RNA molecule or a polypeptide. In a preferred embodiment, a binding agent is an antibody or an antigen-binding fragment thereof. Antibodies may be prepared by any of a variety of techniques known to those of ordinary skill in the art. See, e.g., Harlow and Lane, Antibodies: A Laboratory Manual, Cold Spring Harbor Laboratory, 1988. In general, antibodies can be produced by cell culture techniques, including the generation of monoclonal antibodies as described herein, or via transfection of antibody genes into suitable bacterial or mammalian cell hosts, in order to allow for the production of recombinant antibodies. In one technique, an immunogen comprising the polypeptide is initially injected into any of a wide variety of mammals (e.g., mice, rats, rabbits, sheep or goats). In this step, the polypeptides of this invention may serve as the immunogen without modification. Alternatively, particularly for relatively short polypeptides, a superior immune response may be elicited if the polypeptide is joined to a carrier protein, such as bovine serum albumin or keyhole limpet hemocyanin. The immunogen is injected into the animal host, preferably according to a predetermined schedule incorporating one or more booster immunizations, and the animals are bled periodically. Polyclonal antibodies specific for the polypeptide may then be purified from such antisera by, for example, affinity chromatography using the polypeptide coupled to a suitable solid support.

[1221] Monoclonal antibodies specific for an antigenic polypeptide of interest may be prepared, for example, using the technique of Kohler and Milstein, Eur. J. Immunol. 6:511-519, 1976, and improvements thereto. Briefly, these methods involve the preparation of immortal cell lines capable of producing antibodies having the desired specificity (i.e., reactivity with the polypeptide of interest). Such cell lines may be produced, for example, from spleen cells obtained from an animal immunized as described above. The spleen cells are then immortalized by, for example, fusion with a myeloma cell fusion partner, preferably one that is syngeneic with the immunized animal. A variety of fusion techniques may be employed. For example, the spleen cells and myeloma cells may be combined with a nonionic detergent for a few minutes and then plated at low density on a selective medium that supports the growth of hybrid cells, but not myeloma cells. A preferred selection technique uses HAT (hypoxanthine, aminopterin, thymidine) selection. After a sufficient time, usually about 1 to 2 weeks, colonies of hybrids are observed. Single colonies are selected and their culture supernatants tested for binding activity against the polypeptide. Hybridomas having high reactivity and specificity are preferred.

[1222] Monoclonal antibodies may be isolated from the supernatants of growing hybridoma colonies. In addition, various techniques may be employed to enhance the yield, such as injection of the hybridoma cell line into the peritoneal cavity of a suitable vertebrate host, such as a mouse. Monoclonal antibodies may then be harvested from the ascites fluid or the blood. Contaminants may be removed from the antibodies by conventional techniques, such as chromatography, gel filtration, precipitation, and extraction. The polypeptides of this invention may be used in the purification process in, for example, an affinity chromatography step.

[1223] Within certain embodiments, the use of antigen-binding fragments of antibodies may be preferred. Such fragments include Fab fragments, which may be prepared using standard techniques. Briefly, immunoglobulins may be purified from rabbit serum by affinity chromatography on Protein A bead columns (Harlow and Lane, Antibodies: A Laboratory Manual, Cold Spring Harbor Laboratory, 1988) and digested by papain to yield Fab and Fe fragments. The Fab and Fc fragments may be separated by affinity chromatography on protein A bead columns.

[1224] Monoclonal antibodies of the present invention may be coupled to one or more therapeutic agents. Suitable agents in this regard include radionuclides, differentiation inducers, drugs, toxins, and derivatives thereof. Preferred radionuclides include ⁹⁰y, ¹²³I, ¹²⁵I, ¹³¹I, ¹⁸⁶Re, ¹⁸⁸Re, ²¹¹At, and ²¹²Bi. Preferred drugs include methotrexate, and pyrimidine and purine analogs. Preferred differentiation inducers include phorbol esters and butyric acid. Preferred toxins include ricin, abrin, diptheria toxin, cholera toxin, gelonin, Pseudomonas exotoxin, Shigella toxin, and pokeweed antiviral protein.

[1225] A therapeutic agent may be coupled (e.g., covalently bonded) to a suitable monoclonal antibody either directly or indirectly (e.g., via a linker group). A direct reaction between an agent and an antibody is possible when each possesses a substituent capable of reacting with the other. For example, a nucleophilic group, such as an amino or sulfhydryl group, on one may be capable of reacting with a carbonyl-containing group, such as an anhydride or an acid halide, or with an alkyl group containing a good leaving group (e.g., a halide) on the other.

[1226] Alternatively, it may be desirable to couple a therapeutic agent and an antibody via a linker group. A linker group can function as a spacer to distance an antibody from an agent in order to avoid interference with binding capabilities. A linker group can also serve to increase the chemical reactivity of a substituent on an agent or an antibody, and thus increase the coupling efficiency. An increase in chemical reactivity may also facilitate the use of agents, or functional groups on agents, which otherwise would not be possible.

[1227] It will be evident to those skilled in the art that a variety of bifunctional or polyfunctional reagents, both homo- and hetero-functional (such as those described in the catalog of the Pierce Chemical Co., Rockford, Ill.), may be employed as the linker group. Coupling may be effected, for example, through amino groups, carboxyl groups, sulfhydryl groups or oxidized carbohydrate residues. There are numerous references describing such methodology, e.g., U.S. Pat. No. 4,671,958, to Rodwell et al.

[1228] Where a therapeutic agent is more potent when free from the antibody portion of the immunoconjugates of the present invention, it may be desirable to use a linker group which is cleavable during or upon internalization into a cell. A number of different cleavable linker groups have been described. The mechanisms for the intracellular release of an agent from these linker groups include cleavage by reduction of a disulfide bond (e.g., U.S. Pat. No. 4,489,710, to Spitler), by irradiation of a photolabile bond (e.g., U.S. Pat. No. 4,625,014, to Senter et al.), by hydrolysis of derivatized amino acid side chains (e.g., U.S. Pat. No. 4,638,045, to Kohn et al.), by serum complement-mediated hydrolysis (e.g., U.S. Pat. No. 4,671,958, to Rodwell et al.), and acid-catalyzed hydrolysis (e.g., U.S. Pat. No. 4,569,789, to Blattler et al.).

[1229] It may be desirable to couple more than one agent to an antibody. In one embodiment, multiple molecules of an agent are coupled to one antibody molecule. In another embodiment, more than one type of agent may be coupled to one antibody. Regardless of the particular embodiment, immunoconjugates with more than one agent may be prepared in a variety of ways. For example, more than one agent may be coupled directly to an antibody molecule, or linkers which provide multiple sites for attachment can be used. Alternatively, a carrier can be used.

[1230] A carrier may bear the agents in a variety of ways, including covalent bonding either directly or via a linker group. Suitable carriers include proteins such as albumins (e.g., U.S. Pat. No. 4,507,234, to Kato et al.), peptides and polysaccharides such as aminodextran (e.g., U.S. Pat. No. 4,699,784, to Shih et al.). A carrier may also bear an agent by noncovalent bonding or by encapsulation, such as within a liposome vesicle (e.g., U.S. Patent Nos. 4,429,008 and 4,873,088). Carriers specific for radionuclide agents include radiohalogenated small molecules and chelating compounds. For example, U.S. Pat. No. 4,735,792 discloses representative radiohalogenated small molecules and their synthesis. A radionuclide chelate may be formed from chelating compounds that include those containing nitrogen and sulfur atoms as the donor atoms for binding the metal, or metal oxide, radionuclide. For example, U.S. Pat. No. 4,673,562, to Davison et al. discloses representative chelating compounds and their synthesis.

[1231] A variety of routes of administration for the antibodies and immunoconjugates may be used. Typically, administration will be intravenous, intramuscular, subcutaneous or in the bed of a resected tumor. It will be evident that the precise dose of the antibody/immunoconjugate will vary depending upon the antibody used, the antigen density on the tumor, and the rate of clearance of the antibody.

[1232] T Cells

[1233] Immunotherapeutic compositions may also, or alternatively, comprise T cells specific for a colon tumor protein. Such cells may generally be prepared in vitro or ex vivo, using standard procedures. For example, T cells may be isolated from bone marrow, peripheral blood, or a fraction of bone marrow or peripheral blood of a patient, using a commercially available cell separation system, such as the ISOLEX™ system, available from Nexell Therapeutics Inc., Irvine, Calif. Alternatively, T cells may be derived from related or unrelated humans, non-human mammals, cell lines or cultures.

[1234] T cells may be stimulated with a colon tumor polypeptide, polynucleotide encoding a colon tumor polypeptide and/or an antigen presenting cell (APC) that expresses such a polypeptide. Such stimulation is performed under conditions and for a time sufficient to permit the generation of T cells that are specific for the polypeptide. Preferably, a colon tumor polypeptide or polynucleotide is present within a delivery vehicle, such as a microsphere, to facilitate the generation of specific T cells.

[1235] T cells are considered to be specific for a colon tumor polypeptide if the T cells kill target cells coated with the polypeptide or expressing a gene encoding the polypeptide. T cell specificity may be evaluated using any of a variety of standard techniques. For example, within a chromium release assay or proliferation assay, a stimulation index of more than two fold increase in lysis and/or proliferation, compared to negative controls, indicates T cell specificity. Such assays may be performed, for example, as described in Chen et al., Cancer Res. 54:1065-1070, 1994. Alternatively, detection of the proliferation of T cells may be accomplished by a variety of known techniques. For example, T cell proliferation can be detected by measuring an increased rate of DNA synthesis (e.g., by pulse-labeling cultures of T cells with tritiated thymidine and measuring the amount of tritiated thymidine incorporated into DNA). Contact with a colon tumor polypeptide (100 ng/ml −100 μg/ml, preferably 200 ng/ml −25 μg/ml) for 3-7 days should result in at least a two fold increase in proliferation of the T cells. Contact as described above for 2-3 hours should result in activation of the T cells, as measured using standard cytokine assays in which a two fold increase in the level of cytokine release (e.g., TNF or IFN-γ) is indicative of T cell activation (see Coligan et al., Current Protocols in Immunology, vol. 1, Wiley Interscience (Greene 1998)). T cells that have been activated in response to a colon tumor polypeptide, polynucleotide or polypeptide-expressing APC may be CD4⁺ and/or CD8⁺. Colon tumor protein-specific T cells may be expanded using standard techniques. Within preferred embodiments, the T cells are derived from either a patient or a related, or unrelated, donor and are administered to the patient following stimulation and expansion.

[1236] For therapeutic purposes, CD4⁺ or CD8⁺ T cells that proliferate in response to a colon tumor polypeptide, polynucleotide or APC can be expanded in number either in vitro or in vivo. Proliferation of such T cells in vitro may be accomplished in a variety of ways. For example, the T cells can be re-exposed to a colon tumor polypeptide, or a short peptide corresponding to an immunogenic portion of such a polypeptide, with or without the addition of T cell growth factors, such as interleukin-2, and/or stimulator cells that synthesize a colon tumor polypeptide. Alternatively, one or more T cells that proliferate in the presence of a colon tumor protein can be expanded in number by cloning. Methods for cloning cells are well known in the art, and include limiting dilution.

[1237] Pharmaceutical Compositions and Vaccines

[1238] Within certain aspects, polypeptides, polynucleotides, T cells and/or binding agents disclosed herein may be incorporated into pharmaceutical compositions or immunogenic compositions (i.e., vaccines). Pharmaceutical compositions comprise one or more such compounds and a physiologically acceptable carrier. Vaccines may comprise one or more such compounds and an immunostimulant. An immunostimulant may be any substance that enhances or potentiates an immune response to an exogenous antigen. Examples of immunostimulants include adjuvants, biodegradable microspheres (e.g., polylactic galactide) and liposomes (into which the compound is incorporated; see e.g., Fullerton, U.S. Pat. No. 4,235,877). Vaccine preparation is generally described in, for example, M. F. Powell and M. J. Newman, eds., “Vaccine Design (the subunit and adjuvant approach),” Plenum Press (NY, 1995). Pharmaceutical compositions and vaccines within the scope of the present invention may also contain other compounds, which may be biologically active or inactive. For example, one or more immunogenic portions of other tumor antigens may be present, either incorporated into a fusion polypeptide or as a separate compound, within the composition or vaccine.

[1239] A pharmaceutical composition or vaccine may contain DNA encoding one or more of the polypeptides as described above, such that the polypeptide is generated in situ. As noted above, the DNA may be present within any of a variety of delivery systems known to those of ordinary skill in the art, including nucleic acid expression systems, bacteria and viral expression systems. Numerous gene delivery techniques are well known in the art, such as those described by Rolland, Crit. Rev. Therap. Drug Carrier Systems 15:143-198, 1998, and references cited therein. Appropriate nucleic acid expression systems contain the necessary DNA sequences for expression in the patient (such as a suitable promoter and terminating signal). Bacterial delivery systems involve the administration of a bacterium (such as Bacillus-Calmette-Guerrin) that expresses an immunogenic portion of the polypeptide on its cell surface or secretes such an epitope. In a preferred embodiment, the DNA may be introduced using a viral expression system (e.g., vaccinia or other pox virus, retrovirus, or adenovirus), which may involve the use of a non-pathogenic (defective), replication competent virus. Suitable systems are disclosed, for example, in Fisher-Hoch et al., Proc. Natl. Acad. Sci. USA 86:317-321, 1989; Flexner et al., Ann. N. Acad. Sci. 569:86-103, 1989; Flexner et al., Vaccine 8:17-21, 1990; U.S. Pat. Nos. 4,603,112, 4,769,330, and 5,017,487; WO 89/01973; U.S. Pat. No. 4,777,127; GB 2,200,651; EP 0,345,242; WO 91/02805; Berkner, Biotechniques 6:616-627, 1988; Rosenfeld et al., Science 252:431-434, 1991; Kolls et al., Proc. Natl. Acad. Sci. USA 91:215-219, 1994; Kass-Eisler et al., Proc. Natl. Acad. Sci. USA 90:11498-11502, 1993; Guzman et al., Circulation 88:2838-2848, 1993; and Guzman et al., Cir. Res. 73:1202-1207, 1993. Techniques for incorporating DNA into such expression systems are well known to those of ordinary skill in the art. The DNA may also be “naked,” as described, for example, in Ulmer et al., Science 259:1745-1749, 1993 and reviewed by Cohen, Science 259:1691-1692, 1993. The uptake of naked DNA may be increased by coating the DNA onto biodegradable beads, which are efficiently transported into the cells.

[1240] While any suitable carrier known to those of ordinary skill in the art may be employed in the pharmaceutical compositions of this invention, the type of carrier will vary depending on the mode of administration. Compositions of the present invention may be formulated for any appropriate manner of administration, including for example, topical, oral, nasal, intravenous, intracranial, intraperitoneal, subcutaneous or intramuscular administration. For parenteral administration, such as subcutaneous injection, the carrier preferably comprises water, saline, alcohol, a fat, a wax or a buffer. For oral administration, any of the above carriers or a solid carrier, such as mannitol, lactose, starch, magnesium stearate, sodium saccharine, talcum, cellulose, glucose, sucrose, and magnesium carbonate, may be employed. Biodegradable microspheres (e.g., polylactate polyglycolate) may also be employed as carriers for the pharmaceutical compositions of this invention. Suitable biodegradable microspheres are disclosed, for example, in U.S. Pat. Nos. 4,897,268 and 5,075,109.

[1241] Such compositions may also comprise buffers (e.g., neutral buffered saline or phosphate buffered saline), carbohydrates (e.g., glucose, mannose, sucrose or dextrans), mannitol, proteins, polypeptides or amino acids such as glycine, antioxidants, chelating agents such as EDTA or glutathione, adjuvants (e.g., aluminum hydroxide) and/or preservatives. Alternatively, compositions of the present invention may be formulated as a lyophilizate. Compounds may also be encapsulated within liposomes using well known technology.

[1242] Any of a variety of immunostimulants may be employed in the vaccines of this invention. For example, an adjuvant may be included. Most adjuvants contain a substance designed to protect the antigen from rapid catabolism, such as aluminum hydroxide or mineral oil, and a stimulator of immune responses, such as lipid A, Bortadella pertussis or Mycobacterium tuberculosis derived proteins. Suitable adjuvants are commercially available as, for example, Freund's Incomplete Adjuvant and Complete Adjuvant (Difco Laboratories, Detroit, Mich.); Merck Adjuvant 65 (Merck and Company, Inc., Rahway, N.J.); AS-2 (SmithKline Beecham, Philadelphia, Pa.); aluminum salts such as aluminum hydroxide gel (alum) or aluminum phosphate; salts of calcium, iron or zinc; an insoluble suspension of acylated tyrosine; acylated sugars; cationically or anionically derivatized polysaccharides; polyphosphazenes; biodegradable microspheres; monophosphoryl lipid A and quil A. Cytokines, such as GM-CSF or interleukin-2,-7, or -12, may also be used as adjuvants.

[1243] Within the vaccines provided herein, the adjuvant composition is preferably designed to induce an immune response predominantly of the Th1 type. High levels of Th1-type cytokines (e.g., IFN-γ, TNFα, IL-2 and IL-12) tend to favor the induction of cell mediated immune responses to an administered antigen. In contrast, high levels of Th2-type cytokines (e.g., IL-4, IL-5, IL-6 and IL-10) tend to favor the induction of humoral immune responses. Following application of a vaccine as provided herein, a patient will support an immune response that includes Th1- and Th2-type responses. Within a preferred embodiment, in which a response is predominantly Th1-type, the level of Th1-type cytokines will increase to a greater extent than the level of Th2-type cytokines. The levels of these cytokines may be readily assessed using standard assays. For a review of the families of cytokines, see Mosmann and Coffman, Ann. Rev. Immunol. 7:145-173, 1989.

[1244] Preferred adjuvants for use in eliciting a predominantly Th1-type response include, for example, a combination of monophosphoryl lipid A, preferably 3-de-O-acylated monophosphoryl lipid A (3D-MPL), together with an aluminum salt. MPL adjuvants are available from Corixa Corp. (Seattle, Wash.) (see U.S. Pat. Nos. 4,436,727; 4,877,611; 4,866,034 and 4,912,094). CpG-containing oligonucleotides (in which the CpG dinucleotide is unmethylated) also induce a predominantly Th1 response. Such oligonucleotides are well known and are described, for example, in WO 96/02555 and WO 99/33488. Immunostimulatory DNA sequences are also described, for example, by Sato et al., Science 273:352, 1996. Another preferred adjuvant is a saponin, preferably QS21 (Aquila Biopharmaceuticals Inc., Framingham, Mass.), which may be used alone or in combination with other adjuvants. For example, an enhanced system involves the combination of a monophosphoryl lipid A and saponin derivative, such as the combination of QS21 and 3D-MPL as described in WO 94/00153, or a less reactogenic composition where the QS21 is quenched with cholesterol, as described in WO 96/33739. Other preferred formulations comprises an oil-in-water emulsion and tocopherol. A particularly potent adjuvant formulation involving QS21, 3D-MPL and tocopherol in an oil-in-water emulsion is described in WO 95/17210.

[1245] Other preferred adjuvants include Montanide ISA 720 (Seppic, France), SAF (Chiron, Calif., United States), ISCOMS (CSL), MF-59 (Chiron), the SBAS series of adjuvants (e.g., SBAS-2 or SBAS-4, available from SmithKline Beecham, Rixensart, Belgium), Detox (Ribi ImmunoChem Research Inc., Hamilton, Mont.), RC-529 (Corixa, Seattle, Wash.) and Aminoalkyl glucosaminide 4-phosphates (AGPs).

[1246] Any vaccine provided herein may be prepared using well known methods that result in a combination of antigen, immune response enhancer and a suitable carrier or excipient. The compositions described herein may be administered as part of a sustained release formulation (i.e., a formulation such as a capsule, sponge or gel (composed of polysaccharides, for example) that effects a slow release of compound following administration). Such formulations may generally be prepared using well known technology (see, e.g. Coombes et al., Vaccine 14:1429-1438, 1996) and administered by, for example, oral, rectal or subcutaneous implantation, or by implantation at the desired target site. Sustained-release formulations may contain a polypeptide, polynucleotide or antibody dispersed in a carrier matrix and/or contained within a reservoir surrounded by a rate controlling membrane.

[1247] Carriers for use within such formulations are biocompatible, and may also be biodegradable; preferably the formulation provides a relatively constant level of active component release. Such carriers include microparticles of poly(lactide-co-glycolide), as well as polyacrylate, latex, starch, cellulose and dextran. Other delayed-release carriers include supramolecular biovectors, which comprise a non-liquid hydrophilic core (e.g., a cross-linked polysaccharide or oligosaccharide) and, optionally, an external layer comprising an amphiphilic compound, such as a phospholipid (see e.g., U.S. Pat. No. 5,151,254 and PCT applications WO 94/20078, WO/94/23701 and WO 96/06638). The amount of active compound contained within a sustained release formulation depends upon the site of implantation, the rate and expected duration of release and the nature of the condition to be treated or prevented.

[1248] Any of a variety of delivery vehicles may be employed within pharmaceutical compositions and vaccines to facilitate production of an antigen-specific immune response that targets tumor cells. Delivery vehicles include antigen presenting cells (APCs), such as dendritic cells, macrophages, B cells, monocytes and other cells that may be engineered to be efficient APCs. Such cells may, but need not, be genetically modified to increase the capacity for presenting the antigen, to improve activation and/or maintenance of the T cell response, to have anti-tumor effects per se and/or to be immunologically compatible with the receiver (i.e., matched HLA haplotype). APCs may generally be isolated from any of a variety of biological fluids and organs, including tumor and peritumoral tissues, and may be autologous, allogeneic, syngeneic or xenogeneic cells.

[1249] Certain preferred embodiments of the present invention use dendritic cells or progenitors thereof as antigen-presenting cells. Dendritic cells are highly potent APCs (Banchereau and Steinman, Nature 392:245-251, 1998) and have been shown to be effective as a physiological adjuvant for eliciting prophylactic or therapeutic antitumor immunity (see Timmerman and Levy, Ann. Rev. Med. 50:507-529, 1999). In general, dendritic cells may be identified based on their typical shape (stellate in situ, with marked cytoplasmic processes (dendrites) visible in vitro), their ability to take up, process and present antigens with high efficiency, and their ability to activate naive T cell responses. Dendritic cells may, of course, be engineered to express specific cell-surface receptors or ligands that are not commonly found on dendritic cells in vivo or ex vivo, and such modified dendritic cells are contemplated by the present invention. As an alternative to dendritic cells, secreted vesicles antigen-loaded dendritic cells (called exosomes) may be used within a vaccine (see Zitvogel et al., Nature Med. 4:594-600, 1998).

[1250] Dendritic cells and progenitors may be obtained from peripheral blood, bone marrow, tumor-infiltrating cells, peritumoral tissues-infiltrating cells, lymph nodes, spleen, skin, umbilical cord blood or any other suitable tissue or fluid. For example, dendritic cells may be differentiated ex vivo by adding a combination of cytokines such as GM-CSF, IL-4, IL-13 and/or TNFα to cultures of monocytes harvested from peripheral blood. Alternatively, CD34 positive cells harvested from peripheral blood, umbilical cord blood or bone marrow may be differentiated into dendritic cells by adding to the culture medium combinations of GM-CSF, IL-3, TNFα, CD40 ligand, LPS, flt3 ligand and/or other compound(s) that induce differentiation, maturation and proliferation of dendritic cells.

[1251] Dendritic cells are conveniently categorized as “immature” and “mature” cells, which allows a simple way to discriminate between two well characterized phenotypes. However, this nomenclature should not be construed to exclude all possible intermediate stages of differentiation. Immature dendritic cells are characterized as APC with a high capacity for antigen uptake and processing, which correlates with the high expression of Fcγ receptor and mannose receptor. The mature phenotype is typically characterized by a lower expression of these markers, but a high expression of cell surface molecules responsible for T cell activation such as class I and class II MHC, adhesion molecules (e.g., CD54 and CD11) and costimulatory molecules (e.g., CD40, CD80, CD86 and 4-1BB).

[1252] APCs may generally be transfected with a polynucleotide encoding a colon tumor protein (or portion or other variant thereof) such that the colon tumor polypeptide, or an immunogenic portion thereof, is expressed on the cell surface. Such transfection may take place ex vivo, and a composition or vaccine comprising such transfected cells may then be used for therapeutic purposes, as described herein. Alternatively, a gene delivery vehicle that targets a dendritic or other antigen presenting cell may be administered to a patient, resulting in transfection that occurs in vivo. In vivo and ex vivo transfection of dendritic cells, for example, may generally be performed using any methods known in the art, such as those described in WO 97/24447, or the gene gun approach described by Mahvi et al., Immunology and cell Biology 75:456-460, 1997. Antigen loading of dendritic cells may be achieved by incubating dendritic cells or progenitor cells with the colon tumor polypeptide, DNA (naked or within a plasmid vector) or RNA; or with antigen-expressing recombinant bacterium or viruses (e.g., vaccinia, fowlpox, adenovirus or lentivirus vectors). Prior to loading, the polypeptide may be covalently conjugated to an immunological partner that provides T cell help (e.g., a carrier molecule). Alternatively, a dendritic cell may be pulsed with a non-conjugated immunological partner, separately or in the presence of the polypeptide.

[1253] Vaccines and pharmaceutical compositions may be presented in unit-dose or multi-dose containers, such as sealed ampoules or vials. Such containers are preferably hermetically sealed to preserve sterility of the formulation until use. In general, formulations may be stored as suspensions, solutions or emulsions in oily or aqueous vehicles. Alternatively, a vaccine or pharmaceutical composition may be stored in a freeze-dried condition requiring only the addition of a sterile liquid carrier immediately prior to use.

[1254] Cancer Therapy

[1255] In further aspects of the present invention, the compositions described herein may be used for immunotherapy of cancer, such as colon cancer. Within such methods, pharmaceutical compositions and vaccines are typically administered to a patient. As used herein, a “patient” refers to any warm-blooded animal, preferably a human. A patient may or may not be afflicted with cancer. Accordingly, the above pharmaceutical compositions and vaccines may be used to prevent the development of a cancer or to treat a patient afflicted with a cancer. A cancer may be diagnosed using criteria generally accepted in the art, including the presence of a malignant tumor. Pharmaceutical compositions and vaccines may be administered either prior to or following surgical removal of primary tumors and/or treatment such as administration of radiotherapy or conventional chemotherapeutic drugs.

[1256] Within certain embodiments, immunotherapy may be active immunotherapy, in which treatment relies on the in vivo stimulation of the endogenous host immune system to react against tumors with the administration of immune response-modifying agents (such as polypeptides and polynucleotides disclosed herein).

[1257] Within other embodiments, immunotherapy may be passive immunotherapy, in which treatment involves the delivery of agents with established tumor-immune reactivity (such as effector cells or antibodies) that can directly or indirectly mediate antitumor effects and does not necessarily depend on an intact host immune system. Examples of effector cells include T cells as discussed above, T lymphocytes (such as CD8⁺ cytotoxic T lymphocytes and CD4⁺ T-helper tumor-infiltrating lymphocytes), killer cells (such as Natural Killer cells and lymphokine-activated killer cells), B cells and antigen-presenting cells (such as dendritic cells and macrophages) expressing a polypeptide provided herein. T cell receptors and antibody receptors specific for the polypeptides recited herein may be cloned, expressed and transferred into other vectors or effector cells for adoptive immunotherapy. The polypeptides provided herein may also be used to generate antibodies or anti-idiotypic antibodies (as described above and in U.S. Pat. No. 4,918,164) for passive immunotherapy.

[1258] Effector cells may generally be obtained in sufficient quantities for adoptive immunotherapy by growth in vitro, as described herein. Culture conditions for expanding single antigen-specific effector cells to several billion in number with retention of antigen recognition in vivo are well known in the art. Such in vitro culture conditions typically use intermittent stimulation with antigen, often in the presence of cytokines (such as IL-2) and non-dividing feeder cells. As noted above, immunoreactive polypeptides as provided herein may be used to rapidly expand antigen-specific T cell cultures in order to generate a sufficient number of cells for immunotherapy. In particular, antigen-presenting cells, such as dendritic, macrophage, monocyte, fibroblast and/or B cells, may be pulsed with immunoreactive polypeptides or transfected with one or more polynucleotides using standard techniques well known in the art. For example, antigen-presenting cells can be transfected with a polynucleotide having a promoter appropriate for increasing expression in a recombinant virus or other expression system. Cultured effector cells for use in therapy must be able to grow and distribute widely, and to survive long term in vivo. Studies have shown that cultured effector cells can be induced to grow in vivo and to survive long term in substantial numbers by repeated stimulation with antigen supplemented with IL-2 (see, for example, Cheever et al., Immunological Reviews 157:177, 1997).

[1259] Alternatively, a vector expressing a polypeptide recited herein may be introduced into antigen presenting cells taken from a patient and clonally propagated ex vivo for transplant back into the same patient. Transfected cells may be reintroduced into the patient using any means known in the art, preferably in sterile form by intravenous, intracavitary, intraperitoneal or intratumor administration.

[1260] Routes and frequency of administration of the therapeutic compositions disclosed herein, as well as dosage, will vary from individual to individual, and may be readily established using standard techniques. In general, the pharmaceutical compositions and vaccines may be administered by injection (e.g., intracutaneous, intramuscular, intravenous or subcutaneous), intranasally (e.g., by aspiration) or orally. Preferably, between 1 and 10 doses may be administered over a 52 week period. Preferably, 6 doses are administered, at intervals of 1 month, and booster vaccinations may be given periodically thereafter. Alternate protocols may be appropriate for individual patients. A suitable dose is an amount of a compound that, when administered as described above, is capable of promoting an anti-tumor immune response, and is at least 10-50% above the basal (i.e., untreated) level. Such response can be monitored by measuring the anti-tumor antibodies in a patient or by vaccine-dependent generation of cytolytic effector cells capable of killing the patient's tumor cells in vitro. Such vaccines should also be capable of causing an immune response that leads to an improved clinical outcome (e.g., more frequent remissions, complete or partial or longer disease-free survival) in vaccinated patients as compared to non-vaccinated patients. In general, for pharmaceutical compositions and vaccines comprising one or more polypeptides, the amount of each polypeptide present in a dose ranges from about 25 μg to 5 mg per kg of host. Suitable dose sizes will vary with the size of the patient, but will typically range from about 0.1 mL to about 5 mL.

[1261] In general, an appropriate dosage and treatment regimen provides the active compound(s) in an amount sufficient to provide therapeutic and/or prophylactic benefit. Such a response can be monitored by establishing an improved clinical outcome (e.g., more frequent remissions, complete or partial, or longer disease-free survival) in treated patients as compared to non-treated patients. Increases in preexisting immune responses to a colon tumor protein generally correlate with an improved clinical outcome. Such immune responses may generally be evaluated using standard proliferation, cytotoxicity or cytokine assays, which may be performed using samples obtained from a patient before and after treatment.

[1262] Methods for Detecting Cancer

[1263] In general, a cancer may be detected in a patient based on the presence of one or more colon tumor proteins and/or polynucleotides encoding such proteins in a biological sample (for example, blood, sera, sputum, urine and/or tumor biopsies) obtained from the patient. In other words, such proteins may be used as markers to indicate the presence or absence of a cancer such as colon cancer. In addition, such proteins may be useful for the detection of other cancers. The binding agents provided herein generally permit detection of the level of antigen that binds to the agent in the biological sample. Polynucleotide primers and probes may be used to detect the level of mRNA encoding a tumor protein, which is also indicative of the presence or absence of a cancer. In general, a colon tumor sequence should be present at a level that is at least three fold higher in tumor tissue than in normal tissue.

[1264] There are a variety of assay formats known to those of ordinary skill in the art for using a binding agent to detect polypeptide markers in a sample. See, e.g., Harlow and Lane, Antibodies: A Laboratory Manual, Cold Spring Harbor Laboratory, 1988. In general, the presence or absence of a cancer in a patient may be determined by (a) contacting a biological sample obtained from a patient with a binding agent; (b) detecting in the sample a level of polypeptide that binds to the binding agent; and (c) comparing the level of polypeptide with a predetermined cut-off value.

[1265] In a preferred embodiment, the assay involves the use of binding agent immobilized on a solid support to bind to and remove the polypeptide from the remainder of the sample. The bound polypeptide may then be detected using a detection reagent that contains a reporter group and specifically binds to the binding agent/polypeptide complex. Such detection reagents may comprise, for example, a binding agent that specifically binds to the polypeptide or an antibody or other agent that specifically binds to the binding agent, such as an anti-immunoglobulin, protein G, protein A or a lectin. Alternatively, a competitive assay may be utilized, in which a polypeptide is labeled with a reporter group and allowed to bind to the immobilized binding agent after incubation of the binding agent with the sample. The extent to which components of the sample inhibit the binding of the labeled polypeptide to the binding agent is indicative of the reactivity of the sample with the immobilized binding agent. Suitable polypeptides for use within such assays include full length colon tumor proteins and portions thereof to which the binding agent binds, as described above.

[1266] The solid support may be any material known to those of ordinary skill in the art to which the tumor protein may be attached. For example, the solid support may be a test well in a microtiter plate or a nitrocellulose or other suitable membrane. Alternatively, the support may be a bead or disc, such as glass, fiberglass, latex or a plastic material such as polystyrene or polyvinylchloride. The support may also be a magnetic particle or a fiber optic sensor, such as those disclosed, for example, in U.S. Pat. No. 5,359,681. The binding agent may be immobilized on the solid support using a variety of techniques known to those of skill in the art, which are amply described in the patent and scientific literature. In the context of the present invention, the term “immobilization” refers to both noncovalent association, such as adsorption, and covalent attachment (which may be a direct linkage between the agent and functional groups on the support or may be a linkage by way of a cross-linking agent). Immobilization by adsorption to a well in a microtiter plate or to a membrane is preferred. In such cases, adsorption may be achieved by contacting the binding agent, in a suitable buffer, with the solid support for a suitable amount of time. The contact time varies with temperature, but is typically between about 1 hour and about 1 day. In general, contacting a well of a plastic microtiter plate (such as polystyrene or polyvinylchloride) with an amount of binding agent ranging from about 10 ng to about 10 μg, and preferably about 100 ng to about 1 μg, is sufficient to immobilize an adequate amount of binding agent.

[1267] Covalent attachment of binding agent to a solid support may generally be achieved by first reacting the support with a bifunctional reagent that will react with both the support and a functional group, such as a hydroxyl or amino group, on the binding agent. For example, the binding agent may be covalently attached to supports having an appropriate polymer coating using benzoquinone or by condensation of an aldehyde group on the support with an amine and an active hydrogen on the binding partner (see, e.g., Pierce Immunotechnology Catalog and Handbook, 1991, at A12-A13).

[1268] In certain embodiments, the assay is a two-antibody sandwich assay. This assay may be performed by first contacting an antibody that has been immobilized on a solid support, commonly the well of a microtiter plate, with the sample, such that polypeptides within the sample are allowed to bind to the immobilized antibody. Unbound sample is then removed from the immobilized polypeptide-antibody complexes and a detection reagent (preferably a second antibody capable of binding to a different site on the polypeptide) containing a reporter group is added. The amount of detection reagent that remains bound to the solid support is then determined using a method appropriate for the specific reporter group.

[1269] More specifically, once the antibody is immobilized on the support as described above, the remaining protein binding sites on the support are typically blocked. Any suitable blocking agent known to those of ordinary skill in the art, such as bovine serum albumin or Tween 20™ (Sigma Chemical Co., St. Louis, Mo.). The immobilized antibody is then incubated with the sample, and polypeptide is allowed to bind to the antibody. The sample may be diluted with a suitable diluent, such as phosphate-buffered saline (PBS) prior to incubation. In general, an appropriate contact time (i.e., incubation time) is a period of time that is sufficient to detect the presence of polypeptide within a sample obtained from an individual with colon cancer. Preferably, the contact time is sufficient to achieve a level of binding that is at least about 95% of that achieved at equilibrium between bound and unbound polypeptide. Those of ordinary skill in the art will recognize that the time necessary to achieve equilibrium may be readily determined by assaying the level of binding that occurs over a period of time. At room temperature, an incubation time of about 30 minutes is generally sufficient.

[1270] Unbound sample may then be removed by washing the solid support with an appropriate buffer, such as PBS containing 0.1% Tween 20™. The second antibody, which contains a reporter group, may then be added to the solid support. Preferred reporter groups include those groups recited above.

[1271] The detection reagent is then incubated with the immobilized antibody-polypeptide complex for an amount of time sufficient to detect the bound polypeptide. An appropriate amount of time may generally be determined by assaying the level of binding that occurs over a period of time. Unbound detection reagent is then removed and bound detection reagent is detected using the reporter group. The method employed for detecting the reporter group depends upon the nature of the reporter group. For radioactive groups, scintillation counting or autoradiographic methods are generally appropriate. Spectroscopic methods may be used to detect dyes, luminescent groups and fluorescent groups. Biotin may be detected using avidin, coupled to a different reporter group (commonly a radioactive or fluorescent group or an enzyme). Enzyme reporter groups may generally be detected by the addition of substrate (generally for a specific period of time), followed by spectroscopic or other analysis of the reaction products.

[1272] To determine the presence or absence of a cancer, such as colon cancer, the signal detected from the reporter group that remains bound to the solid support is generally compared to a signal that corresponds to a predetermined cut-off value. In one preferred embodiment, the cut-off value for the detection of a cancer is the average mean signal obtained when the immobilized antibody is incubated with samples from patients without the cancer. In general, a sample generating a signal that is three standard deviations above the predetermined cut-off value is considered positive for the cancer. In an alternate preferred embodiment, the cut-off value is determined using a Receiver Operator Curve, according to the method of Sackett et al., Clinical Epidemiology: A Basic Science for Clinical Medicine, Little Brown and Co., 1985, p. 106-7. Briefly, in this embodiment, the cut-off value may be determined from a plot of pairs of true positive rates (i.e., sensitivity) and false positive rates (100%-specificity) that correspond to each possible cut-off value for the diagnostic test result. The cut-off value on the plot that is the closest to the upper left-hand corner (i.e., the value that encloses the largest area) is the most accurate cut-off value, and a sample generating a signal that is higher than the cut-off value determined by this method may be considered positive. Alternatively, the cut-off value may be shifted to the left along the plot, to minimize the false positive rate, or to the right, to minimize the false negative rate. In general, a sample generating a signal that is higher than the cut-off value determined by this method is considered positive for a cancer.

[1273] In a related embodiment, the assay is performed in a flow-through or strip test format, wherein the binding agent is immobilized on a membrane, such as nitrocellulose. In the flow-through test, polypeptides within the sample bind to the immobilized binding agent as the sample passes through the membrane. A second, labeled binding agent then binds to the binding agent-polypeptide complex as a solution containing the second binding agent flows through the membrane. The detection of bound second binding agent may then be performed as described above. In the strip test format, one end of the membrane to which binding agent is bound is immersed in a solution containing the sample. The sample migrates along the membrane through a region containing second binding agent and to the area of immobilized binding agent. Concentration of second binding agent at the area of immobilized antibody indicates the presence of a cancer. Typically, the concentration of second binding agent at that site generates a pattern, such as a line, that can be read visually. The absence of such a pattern indicates a negative result. In general, the amount of binding agent immobilized on the membrane is selected to generate a visually discernible pattern when the biological sample contains a level of polypeptide that would be sufficient to generate a positive signal in the two-antibody sandwich assay, in the format discussed above. Preferred binding agents for use in such assays are antibodies and antigen-binding fragments thereof. Preferably, the amount of antibody immobilized on the membrane ranges from about 25 ng to about 1 μg, and more preferably from about 50 ng to about 500 ng. Such tests can typically be performed with a very small amount of biological sample.

[1274] Of course, numerous other assay protocols exist that are suitable for use with the tumor proteins or binding agents of the present invention. The above descriptions are intended to be exemplary only. For example, it will be apparent to those of ordinary skill in the art that the above protocols may be readily modified to use colon tumor polypeptides to detect antibodies that bind to such polypeptides in a biological sample. The detection of such colon tumor protein specific antibodies may correlate with the presence of a cancer.

[1275] A cancer may also, or alternatively, be detected based on the presence of T cells that specifically react with a colon tumor protein in a biological sample. Within certain methods, a biological sample comprising CD4⁺ and/or CD8⁺ T cells isolated from a patient is incubated with a colon tumor polypeptide, a polynucleotide encoding such a polypeptide and/or an APC that expresses at least an immunogenic portion of such a polypeptide, and the presence or absence of specific activation of the T cells is detected. Suitable biological samples include, but are not limited to, isolated T cells. For example, T cells may be isolated from a patient by routine techniques (such as by Ficoll/Hypaque density gradient centrifugation of peripheral blood lymphocytes). T cells may be incubated in vitro for 2-9 days (typically 4 days) at 37° C. with one or more representative polypeptides (e.g., 5-25 μg/ml). It may be desirable to incubate another aliquot of a T cell sample in the absence of colon tumor polypeptide to serve as a control. For CD4⁺ T cells, activation is preferably detected by evaluating proliferation of the T cells. For CD8⁺ T cells, activation is preferably detected by evaluating cytolytic activity. A level of proliferation that is at least two fold greater and/or a level of cytolytic activity that is at least 20% greater than in disease-free patients indicates the presence of a cancer in the patient.

[1276] As noted above, a cancer may also, or alternatively, be detected based on the level of mRNA encoding a colon tumor protein in a biological sample. For example, at least two oligonucleotide primers may be employed in a polymerase chain reaction (PCR) based assay to amplify a portion of a colon tumor cDNA derived from a biological sample, wherein at least one of the oligonucleotide primers is specific for (i.e., hybridizes to) a polynucleotide encoding the colon tumor protein. The amplified cDNA is then separated and detected using techniques well known in the art, such as gel electrophoresis. Similarly, oligonucleotide probes that specifically hybridize to a polynucleotide encoding a colon tumor protein may be used in a hybridization assay to detect the presence of polynucleotide encoding the tumor protein in a biological sample.

[1277] To permit hybridization under assay conditions, oligonucleotide primers and probes should comprise an oligonucleotide sequence that has at least about 60%, preferably at least about 75% and more preferably at least about 90%, identity to a portion of a polynucleotide encoding a colon tumor protein that is at least 10 nucleotides, and preferably at least 20 nucleotides, in length. Preferably, oligonucleotide primers and/or probes will hybridize to a polynucleotide encoding a polypeptide disclosed herein under moderately stringent conditions, as defined above. Oligonucleotide primers and/or probes which may be usefully employed in the diagnostic methods described herein preferably are at least 10-40 nucleotides in length. In a preferred embodiment, the oligonucleotide primers comprise at least 10 contiguous nucleotides, more preferably at least 15 contiguous nucleotides, of a DNA molecule having a sequence recited in SEQ ID NO: 1-121, 123-197, 205-630, 632-684, 686, 690-691, 694-1058, 1069, 1071-1076, 1082, 1084, 1086, 1092, 1094, 1096-1101, 1103-1106, 1111-1114, 1119, 1120, and 1125. Techniques for both PCR based assays and hybridization assays are well known in the art (see, for example, Mullis et al., Cold Spring Harbor Symp. Quant. Biol., 51:263, 1987; Erlich ed., PCR Technology, Stockton Press, NY, 1989).

[1278] One preferred assay employs RT-PCR, in which PCR is applied in conjunction with reverse transcription. Typically, RNA is extracted from a biological sample, such as biopsy tissue, and is reverse transcribed to produce cDNA molecules. PCR amplification using at least one specific primer generates a cDNA molecule, which may be separated and visualized using, for example, gel electrophoresis. Amplification may be performed on biological samples taken from a test patient and from an individual who is not afflicted with a cancer. The amplification reaction may be performed on several dilutions of cDNA spanning two orders of magnitude. A two-fold or greater increase in expression in several dilutions of the test patient sample as compared to the same dilutions of the non-cancerous sample is typically considered positive.

[1279] In another embodiment, the disclosed compositions may be used as markers for the progression of cancer. In this embodiment, assays as described above for the diagnosis of a cancer may be performed over time, and the change in the level of reactive polypeptide(s) or polynucleotide evaluated. For example, the assays may be performed every 24-72 hours for a period of 6 months to 1 year, and thereafter performed as needed. In general, a cancer is progressing in those patients in whom the level of polypeptide or polynucleotide detected increases over time. In contrast, the cancer is not progressing when the level of reactive polypeptide or polynucleotide either remains constant or decreases with time.

[1280] Certain in vivo diagnostic assays may be performed directly on a tumor. One such assay involves contacting tumor cells with a binding agent. The bound binding agent may then be detected directly or indirectly via a reporter group. Such binding agents may also be used in histological applications. Alternatively, polynucleotide probes may be used within such applications.

[1281] As noted above, to improve sensitivity, multiple colon tumor protein markers may be assayed within a given sample. It will be apparent that binding agents specific for different proteins provided herein may be combined within a single assay. Further, multiple primers or probes may be used concurrently. The selection of tumor protein markers may be based on routine experiments to determine combinations that results in optimal sensitivity. In addition, or alternatively, assays for tumor proteins provided herein may be combined with assays for other known tumor antigens.

[1282] Diagnostic Kits

[1283] The present invention further provides kits for use within any of the above diagnostic methods. Such kits typically comprise two or more components necessary for performing a diagnostic assay. Components may be compounds, reagents, containers and/or equipment. For example, one container within a kit may contain a monoclonal antibody or fragment thereof that specifically binds to a colon tumor protein. Such antibodies or fragments may be provided attached to a support material, as described above. One or more additional containers may enclose elements, such as reagents or buffers, to be used in the assay. Such kits may also, or alternatively, contain a detection reagent as described above that contains a reporter group suitable for direct or indirect detection of antibody binding.

[1284] Alternatively, a kit may be designed to detect the level of mRNA encoding a colon tumor protein in a biological sample. Such kits generally comprise at least one oligonucleotide probe or primer, as described above, that hybridizes to a polynucleotide encoding a colon tumor protein. Such an oligonucleotide may be used, for example, within a PCR or hybridization assay. Additional components that may be present within such kits include a second oligonucleotide and/or a diagnostic reagent or container to facilitate the detection of a polynucleotide encoding a colon tumor protein.

[1285] The following Examples are offered by way of illustration and not by way of limitation.

### EXAMPLES

### Example 1

### Isolation and Characterization of Colon Tumor Polypeptides by PCR-Based Subtraction and Microarray Analaysis

[1286] A cDNA library was constructed in the PCR2.1 vector (Invitrogen, Carlsbad, Calif.) by subtracting a pool of three colon tumors with a pool of normal colon, spleen, brain, liver, kidney, lung, stomach and small intestine using PCR subtraction methodologies (Clontech, Palo Alto, Calif.). The subtraction was performed using a PCR-based protocol, which was modified to generate larger fragments. Within this protocol, tester and driver double stranded cDNA were separately digested with five restriction enzymes that recognize six-nucleotide restriction sites (MluI, MscI, PvuII, SalI and StuI). This digestion resulted in an average cDNA size of 600 bp, rather than the average size of 300 bp that results from digestion with RsaI according to the Clontech protocol. This modification did not affect the subtraction efficiency. Two tester populations were then created with different adapters, and the driver library remained without adapters.

[1287] The tester and driver libraries were then hybridized using excess driver cDNA. In the first hybridization step, driver was separately hybridized with each of the two tester cDNA populations. This resulted in populations of (a) unhybridized tester cDNAs, (b) tester cDNAs hybridized to other tester cDNAs, (c) tester cDNAs hybridized to driver cDNAs, and (d) unhybridized driver cDNAs. The two separate hybridization reactions were then combined, and rehybridized in the presence of additional denatured driver cDNA. Following this second hybridization, in addition to populations (a) through (d), a fifth population (e) was generated in which tester cDNA with one adapter hybridized to tester cDNA with the second adapter. Accordingly, the second hybridization step resulted in enrichment of differentially expressed sequences which could be used as templates for PCR amplification with adaptor-specific primers.

[1288] The ends were then filled in, and PCR amplification was performed using adaptor-specific primers. Only population (e), which contained tester cDNA that did not hybridize to driver cDNA, was amplified exponentially. A second PCR amplification step was then performed, to reduce background and further enrich differentially expressed sequences.

[1289] This PCR-based subtraction technique normalizes differentially expressed cDNAs so that rare transcripts that are over-expressed in colon tumor tissue may be recoverable. Such transcripts would be difficult to recover by traditional subtraction methods.

[1290] To characterize the complexity and redundancy of the subtracted library, 96 clones were randomly picked and 65 were sequenced, as previously described. These sequences were further characterized by comparison with the most recent Genbank database (April, 1998) to determine their degree of novelty. No significant homologies were found to 21 of these clones, hereinafter referred to as 11092, 11093, 11096, 11098, 11103, 11174, 11108, 11112, 11115, 11117, 11118, 11134, 11151, 11154, 11158, 11168, 11172, 11175, 11184, 11185 and 11187. The determined cDNA sequences for these clones are provided in SEQ ID NO: 48, 49, 52, 54, 59, 60, 65-69, 79, 89, 90, 93, 99-101 and 109-111, respectively.

[1291] Two-thousand clones from the above mentioned cDNA subtraction library were randomly picked and submitted to a round of PCR amplification. Briefly, 0.5 μl of glycerol stock solution was added to 99.5 μl of pcr MIX (80 μl H₂O, 10 μl 10× PCR Buffer, 6 μl 25 mM MgCl₂, 1 μl 10 mM dNTPs, 1 μl 100 mM M13 forward primer (CACGACGTTGTAAAACGACGG), 1 μl 100 mM M13 reverse primer (CACAGGAAACAGCTATGACC)), and 0.5 μl 5 u/ml Taq polymerase (primers provided by (Operon Technologies, Alameda, Calif.). The PCR amplification was run for thirty cycles under the following conditions: 95° C. for 5 min., 92° C. for 30 sec., 57° C. for 40 sec., 75° C. for 2 min. and 75° C. for 5 minutes.

[1292] mRNA expression levels for representative clones were determined using microarray technology (Synteni, Palo Alto, Calif.) in colon tumor tissues (n=25), normal colon tissues (n=6), kidney, lung, liver, brain, heart, esophagus, small intestine, stomach, pancreas, adrenal gland, salivary gland, resting PBMC, activated PBMC, bone marrow, dendritic cells, spinal cord, blood vessels, skeletal muscle, skin, breast and fetal tissues. The number of tissue samples tested in each case was one (n=1), except where specifically noted above; additionally, all the above-mentioned tissues were derived from humans. The PCR amplification products were dotted onto slides in an array format, with each product occupying a unique location in the array. mRNA was extracted from the tissue sample to be tested, and fluorescent-labeled cDNA probes were generated by reverse transcription according to the protocol provided by Synteni. The microarrays were probed with the labeled cDNA probes, the slides scanned, and fluorescence intensity was measured. This intensity correlates with the hybridization intensity.

[1293] One hundred and forty nine clones showed two or more fold over-expression in the colon tumor probe group as compared to the normal tissue probe group. These cDNA clones were further characterized by DNA sequencing with a Perkin Elmer/Applied Biosystems Division Automated Sequencer Model 373A and/or Model 377 (Foster City, CA). These sequences were compared to known sequences in the most recent GenBank database. No significant homologies to human gene sequences were found in forty nine of these clones, represented by the following sixteen cDNA consensus sequences: SEQ ID NO: 2, 8, 15, 16, 22, 24, 30, 32-34, 36, 38, 40, 41, 46 and 47, hereinafter referred to as Contig 2, 8, 13, 14, 20, 23, 29, 31, 35, 32, 36, 38, 41, 42, 50 and 51, respectively). Contig 29 (SEQ ID NO: 30) was found to be a Rat GSK-3-β-interacting protein Axil homolog. Also, Contigs 31 and 35 (SEQ ID NO: 32 and 33, respectively) were found to be a Mus musculus GOB-4 homolog. The determined cDNA sequences of SEQ ID NO: 1, 3-7, 9-14, 17-21, 23, 25-29, 31, 35, 37, 39, 42-45, 50, 51, 53, 55-58, 61-64, 70-78, 80-88, 91, 92, 94-98, 102-108 and 112 were found to show some homology to previously identified genes sequences.

[1294] Microarray analysis demonstrated Contig 2 (SEQ ID NO: 2) showed over-expression in 34% of colon tumors tested, as well as increased expression in normal pancreatic tissue, with no over-expression in normal colon tissues. Upon further analysis, Contigs 2, 8 and 23 were found to share homology to the known gene GW112. Contigs 4, 5, 9 and 52 showed homology to carcinoembryonic antigen (SEQ ID NO: 3, 4, 5 and 6, respectively). A representative sampling of these fragments showed over-expression in 85% of colon tumors, with over-expression in normal bone marrow and 3/6 normal colon tissues. Contig 6 (SEQ ID NO: 7), showing homology to the known gene sequence for villin, and was over-expressed in about half of all colon tumors tested, with a limited degree of low level over-expression in normal colon. Contig 12 (SEQ ID NO: 14), showing homology to Chromosome 17, clone hRPC.1171_I_{—}10, also referred to as C798P, was over-expressed in approximately 70% of colon tumors tested, with low over-expression in 1/6 normal colon samples. Contig 14, also referred to as 14261 (SEQ ID NO: 16), showing no significant homology to any known gene, showed over-expression in 44% of colon tumors tested, with low level expression in half of normal colon tissues, as well as small intestine and pancreatic tissue. Contig 18 (SEQ ID NO: 21), showing homology to the known gene for L1-cadherin, showed over-expression in approximately half of colon tumors and low level over-expression in 3/6 normal colon tissues tested. Contig 22 (SEQ ID NO: 23), showing homology to Bumetanide-sensitive Na-K-Cl cotransporter was over-expressed in 70% of colon tumors and no over-expression in all normal tissues tested. Contig 25 (SEQ ID NO: 25), showing homology to macrophage inflammatory protein-3a, was over-expressed in over 40% of colon tumors and in activated PBMC. Contigs 26 and 48 (SEQ ID NOS: 25 and 26), showing homology to the sequence for laminin, was over-expressed in 48% of colon tumors and with low over-expression in stomach tissue. Contig 28 (SEQ ID NO: 29), showing homology to the known gene sequence for Chromosome 16 BAC clone CIT987SK-A-363E6, was over-expressed in 33% of colon tumors tested with normal stomach and 2/6 normal colon tissues showing low level over-expression. Contigs 29, 31 and 35 (SEQ ID NOS: 30, 32 and 33, respectively), also referred to as C751P, an unknown sequence showing limited and partial homology to Rat GSK-3β-interacting protein Axil homolog.and Mus musculus GOB-4 homolog, was over-expressed in 74% of colon tumors and no over-expression in all normal tissues tested. Contig 34 (SEQ ID NO: 35), showing homology to the known sequence for desmoglein 2, was over-expressed in 56% of colon tumors and showed low level over-expression in 1/6 normal colon tissues. Contig 36 (SEQ ID NO: 36), an unknown sequence also referred to as C793P, showed over-expression in 30% of colon tumor tissues tested. Contig 37 and 14287.2 (SEQ ID NOS: 37 and 116), an unknown sequence, but with limited (89%) homology to the known sequence for putative transmembrane protein was over-expressed in 70% of colon tumors, as well as in normal lung tissue and 3/6 normal colon tissues tested. Contig 38, also referred to as C796P and 14219 (SEQ ID NO: 38), showing no significant homology to any known gene, was over-expressed in 38% in colon tumors and no elevated over-expression in any normal tissues. Contig 41 (SEQ ID NO: 40), also referred to as C799P and 14308, an unknown sequence showing no significant homology to any known gene, was over-expressed in 22% of colon tumors. Contig 42, (SEQ ID NO: 41), also referred to as C794P and 14309, an unknown sequence with no significant homology to any known gene, was over-expressed in 63% of colon tumors tested, as well as in 3/6 normal colon tissues. Contig 43 (SEQ ID NO: 42), showing homology to the known sequence for Chromosome 1 specific transcript KIAA0487 was over-expressed in 85% of colon tumors tested and in normal lung and 4/6 normal colon tissues. Contig 49 (SEQ ID NO: 45), showing homology to the known sequence for pump-1, was over-expressed in 44% of colon tumors and no over-expression in all normal tissues tested. Contig 50 (SEQ ID NO: 46), also referred to as C792P and 18323, showing no significant homology to any known gene, was over-expressed in 33% of colon tumors with no detectable over-expression in any normal tissues tested. Contig 51 (SEQ ID NO: 47), also referred to as C795P and 14317 was over-expressed in 11% of colon tumors.

[1295] Additional microarray analysis yielded seven clones showing two or more fold over-expression in the colon tumor probe group as compared to the normal tissue probe group. Three of these clones demonstrated particularly good colon tumor specificity, and are represented by SEQ ID NO: 115, 116 and 120. Specifically, SEQ ID NO: 115, referred to as C791P or 14235, which shows homology to the known gene sequence for H. sapiens chromosome 21 derived BAC containing ets-2 gene, was over-expressed in 89% of colon tumors tested and in 5/6 normal colon tissues, as well as over-expressed at low levels in normal lung and activated PBMC. Microarray analysis for SEQ ID NO: 116 is discussed above. SEQ ID NO: 120, referred to as 14295, showing homology to the known gene sequence for secreted cement gland protein XAG-2 homolog, was over-expressed in 70% of colon tumors and in 5/6 normal colon tissues, as well as low level over-expression in normal small intestine, stomach and lung. All clones showing over-expression in colon tumor were sequenced and these sequences compared to the most recent Genbank database (Feb. 12, 1999). Of the seven clones, three contained sequences that did not share significant homology to any known gene sequences, represented by SEQ ID NO: 116, 117 and 119. To the best of the inventors' knowledge, none of these sequences have been previously shown to be present in colon. The determined cDNA sequences of the remaining clones (SEQ ID NO: 113-115 and 120) were found to show some homology to previously identified genes.

[1296] Further analysis identified a clone which was recovered several times by PCR subtraction and by expression screening using a mouse anti-scid antiserum. The determined full length cDNA sequence for this clone is provided in SEQ ID NO: 121, with the corresponding predicted amino acid sequence being provided in SEQ ID NO: 122. This clone is homologous with the known gene Beta IG-H3, as disclosed in U.S. Pat. No. 5,444,164. Microarray analysis demonstrated this clone to be over-expressed in 75 to 80% of colon tumors tested (n=27), with no over-expression in normal colon samples (n=6), but with some low level over-expression in other normal tissues tested.

[1297] Further analysis of the PCR-subtraction library described above led to the isolation of longer cDNA sequences for the clones of SEQ ID NO: 30, 115, 46, 118, 41, 47, 38, 113, 14 and 40 (known as C751P, C791P, C792P, C793P, C794P, C795P, C796P, C797P, C798P and C799P, respectively). These determined cDNA sequences are provided in SEQ ID NO: 123-132, respectively. Additional sequences for the clones C794P and C799P are shown in SEQ ID NO:683 and 684, respectively, and the predicted amino acid sequences are shown in SEQ ID NO:685 and 686, respectively. Still further sequences for the clones C794P and C799P are shown in SEQ ID NO: 691 and 690, respectively, and to the predicted amino acid sequence as shown in SEQ ID NO: 693 and 692, respectively.

[1298] Using PCR subtraction methodology described above with minor modifications, transcripts from a pool of three moderately differentiated colon adenocarcinoma samples were subtracted with a set of transcripts from normal brain, pancreas, bone marrow, liver, heart, lung, stomach and small intestine. Modifications of the above protocol were included at the cDNA digestion steps and in the tester to drive hybridization ratios. In a first subtraction, the restriction enzymes PvuII, DraI, MscI and StuI were used to digest cDNAs, and the tester to driver ratio was 1:40, as suggested by Clontech. In a second subtraction, DraI, MscI and StuI were used for cDNA digestion and a tester to driver ratio of 1:76 was used. Following the PCR amplification steps, the cDNAs were clones into pCR2.1 plasmid vector. The determined cDNA sequences of 167 isolated clones are provided in SEQ ID NO: 205-371. These sequences were compared to sequences in the public databases as described above. The sequences of SEQ ID NO: 205, 207, 210-212, 214, 215, 218, 224-226, 228, 233, 234, 236, 238, 241, 242, 245, 246, 248, 250, 253, 254, 256, 259, 260, 262, 263, 266, 267, 270-273, 279, 282, 291, 293, 294, 298, 300, 302, 303, 310-313, 315, 317, 320, 322, 324, 332-335, 345, 347, 356, 358, 361, 362, 366, 369 and 371 were found to show some homology to previously identified ESTs. The remaining sequences were found to show some homology to previously identified genes.

[1299] Using the PCR subtraction technology described above, a cDNA library from a pool of primary colon tumors was subtracted with a cDNA library prepared from normal tissues, including brain, bone marrow, kidney, heart, lung, liver, pancreas, small intestine, stomach and trachea. The determined cDNA sequences for 90 clones isolated in this subtraction are provided in SEQ ID NO: 372-461. Comparison of these sequences with those in the public databases as described above, revealed no homologies to the sequences of SEQ ID NO: 426, 445 and 453. The sequences of SEQ ID NO: 372-378, 380-404, 406, 409-417, 419-423, 425, 427-429, 433-436, 438-441, 443, 446-451, 454, 455 and 457-461 showed some homology to previously identified genes, while the sequences of SEQ ID NO: 379, 405, 407, 408, 418, 424, 430-432, 437, 442, 444, 452 and 456 showed some homology to previously isolated ESTs.

[1300] Using the PCR subtraction methodology described above, a cDNA library prepared from a pool of metastatic colon tumors was subtracted with cDNA from a pool of normal tissues, namely brain, heart, lung, lymph nodes, PBMC, pancreas, small intestine and stomach. The determined cDNA sequences for 82 clones isolated from the subtracted library are provided in SEQ ID NO: 487-568 (referred to as contigs 1-56 and 58-83, respectively). The sequences of SEQ ID NO: 487, 489, 490, 493-496, 499, 501-509, 511-518, 520-526, 529-542, 544, 546, 548-552, 554, 555, 557, 558, 560, 562, 563, 566 and 567 showed some homology to previously identified gene sequences. The sequences of SEQ ID NO: 488, 491, 492, 497, 498, 500, 510, 519, 527, 528, 543, 545, 547, 553, 559, 564, 564 and 568 showed some homology to previously isolated ESTs.

### Example 2

### Isolation of Tumor Polypeptides using Scid Mouse-Passaged Tumor RNA

[1301] This Example discloses the preparation of antisera against shed/secreted antigens from SCID mice bearing human colon tumors. These antisera may be useful, for example, in the screening of cDNA libraries made from the original human colon tumors for secreted antigens that may, in turn, be useful for identification of therapeutic and/or diagnostic candidates.

[1302] Human colon tumor antigens were obtained using SCID mouse passaged colon tumor RNA as follows. Human colon tumor was implanted in SCID mice and harvested, as described in patent application Ser. No. 08/556,659 filed Nov. 13, 1995, U.S. Pat. No. 5,986,170. First strand cDNA was synthesized from poly A+ RNA from three SCID mouse-passaged colon tumors using a Lambda ZAP Express cDNA synthesis kit (Stratagene). The reactions were pooled and digested with RNase A, T1 and H to cleave the RNA and then treated with NaOH to degrade the RNA. The resulting cDNA was annealed with biotinylated (Vector Labs, Inc., Burlingame, Calif.) cDNA from a normal resting PBMC plasmid library (constructed from Superscript plasmid System, Gibco BRL), and subtracted with streptavidin by phenol/chloroform extraction. Second strand cDNA was synthesized from the subtracted first strand cDNA and digested with SI nuclease (Gibco BRL). The cDNA was blunted with Pfu polymerase and EcoRI adaptors (Stratagene) were ligated to the ends. The cDNA was phosphorylated with T4 polynucleotide kinase, digested with restriction endonuclease XhoI, and size selected with Sephacryl S-400 (Sigma). Fractions were pooled, ligated to Lambda ZAP Express arms (Stratagene) and packaged with Gigapack Gold III extract (Stratagene). Random plaques were picked, phagemid was excised, transformed into XLOLR cells (Stratagene) and resulting plasmid DNA (Qiagen Inc., Valencia, Calif.) was sequenced as described above.

[1303] The determined cDNA sequences for 17 clones isolated as described above are provided in SEQ ID NO: 133-151, wherein 133 and 134 represent partial sequences of a clone referred to as CoSub-3 and SEQ ID NO: 135 and 136 represent partial sequences of a clone referred to as CoSub-13. These sequences were compared with those in the public databases as described above. The sequences of SEQ ID NO: 139 and 149 showed no significant homologies to any previously identified sequences. The sequences of SEQ ID NO: 138, 140, 141, 142, 143, 148 and 149 showed some homology to previously isolated expressed sequence tags (ESTs). The sequences of SEQ ID NO: 133-137, 144-147, 150 and 151 showed some homology to previously isolated gene sequences.

[1304] The determined cDNA sequences for an additional 46 clones isolated as described above, are provided in SEQ ID NO: 569-616, wherein SEQ ID NO: 573 and 574 represent the 3′ and 5′ determined cDNA sequences, respectively, for clone CS 1-106, and SEQ ID NO: 579 and 580 represent the determined 3′ and 5′ cDNA sequences, respectively, for clone CS1-124. Comparison of the isolated sequences with those in the public databases revealed no significant homologies to the sequences of SEQ ID NO: 580, 585, 610 and 613. The sequences of SEQ ID NO: 569, 574-577, 584, 587, 592, 595, 598, 603 and 608 showed some homology to previously isolated ESTs, while the sequences of SEQ ID NO: 570-573, 578, 581-583, 586, 588-591, 593, 594, 596, 597, 599-602, 604-607, 609, 611, 612 and 514-616 showed some homology to previously isolated gene sequences.

### Example 3

### Use of Mouse Antisera to Identify DNA Sequences Encoding Colon Tumor Antigens

[1305] This example illustrates the isolation of cDNA sequences encoding colon tumor antigens by screening of colon tumor cDNA libraries with mouse anti-tumor sera.

[1306] A cDNA expression library was prepared from SCID mouse-passaged human colon tumor poly A+RNA using a Stratagene (La Jolla, Calif.) Lambda ZAP Express kit, following the manufacturer's instructions. Sera was obtained from the colon tumor-bearing SCID mouse. This serum was injected into normal mice to produce anti-colon tumor serum. Approximately 600,000 PFUs were screened from the unamplified library using this antiserum. Using a goat anti-mouse IgG-A-M (H+L) alkaline phosphatase second antibody developed with NBT/BCIP (BRL Labs.), positive plaques were identified. Phage was purified and phagemid excised for several clones with inserts in a pBK-CMV vector for expression in prokaryotic or eukaryotic cells.

[1307] The determined cDNA sequences for 46 of the isolated clones are provided in SEQ ID NO: 152-197. The predicted amino acid sequences for the cDNA sequences of SEQ ID NO: 187, 188, 189, 190, 194, 195 and 197 are provided in SEQ ID NO: 198-204, respectively. The determined cDNA sequences were compared with those in the public database as described above. The sequences of SEQ ID NO: 156, 168, 184, 189, 192 and 196 showed some homology to previously isolated ESTs. The sequences of SEQ ID NO: 152-155, 157-167, 169-182, 183, 185-188, 190, 194, 195 and 197 showed some homology to previously identified genes.

[1308] The determined cDNA sequences for an additional eleven clones isolated as described above, are provided in SEQ ID NO: 617-627. Comparison of these sequences with those in the public database as described above revealed no known homologies to SEQ ID NO: 621 and 623. The sequences of SEQ ID NO: 622 and 626 were found to show some homology to previously isolated ESTs, while the sequences of SEQ ID NO: 617-620, 624, 625 and 627 showed some homology to previously identified genes.

[1309] In further studies, a cDNA library was prepared from SCID-mouse grown colon tumors and screened with mouse anti-SCID serum as described above. Briefly first strand cDNA was synthesized from poly A+ RNA from three SCID mouse-grown human colon tumors using a Lambda ZAP Express cDNA synthesis kit (Stratagene). The reactions were pooled and digested with RNase A, Ti and H to cleave the RNA and then treated with NaOH to degrade the RNA. The cDNA was annealed with biotinylated cDNA from a normal resting PBMC plasmid library (constructed from Superscript plasmid system; Gibco BRL) and subtracted with streptavidin by phenol/chloroform extraction. Second strand cDNA was synthesized from the subtracted first strand cDNA and digested with SI nuclease. The cDNA was blunted with Pfu polymerase and EcoRI adaptors were ligated to the ends. The cDNA was phosphorylated with T4 polynucleotide kinase, digested with restriction endonuclease XhoI, and size selected with Sephacryl S-400 (Sigma). Fractions were pooled, ligated to Lambda ZAP Express arms (Stratagene) and packaged with Gigapack Gold III extract (Stratagene). The resulting library was screened with a mouse antiserum raised against serum from SCID mice containing human colon tumors, including the three tumors used to prepare the cDNA libraries.

[1310] The determined cDNA for one clone isolated using this procedure is provided in SEQ ID NO: 630. This clone was found to show homology to a previously identified gene. The amino acid sequence encoded by the clone of SEQ ID NO: 630 is provided in SEQ ID NO: 631.

[1311] In subsequent studies, an additional cDNA library was prepared from a SCID-passaged human colon tumor and screened with a mouse antiserum raised against serum from the SCID mouse containing the colon tumor. The determined cDNA sequences for 51 clones isolated in these studies are provided in SEQ ID NO: 632-682. Comparison of these sequences with those in the public databases revealed no significant homologies to the sequences of SEQ ID NO: 648 and 668. The sequence of SEQ ID NO: 642 showed some homology to previously isolated ESTs. The sequences of SEQ ID NO: 632-641, 643-647, 649-667 and 669-682 were found to show some homology to previously identified genes. SEQ ID NO: 684 and SEQ ID NO: 690 showed homology to human NADH/NADPH thyroid oxidase p138-tox mRNA.

### Example 4

### Isolation and Characterization of Colon Tumor Polypeptides by Conventional Substraction

[1312] Two cDNA libraries were constructed and used to create a subtracted cDNA library as follows.

[1313] Using the GibcoBRL Superscript Plasmid System with minor modifications, two cDNA libraries were created. The first library, referred to as CTCL, was prepared from a pool of mRNA samples from three colon adenocarcinoma tissue samples. Two of the samples were described as Duke's stage C and one as Duke's stage B. All three samples were grade III in histological status. A second library (referred to as DriverLibpcDNA3.1+) was prepared from a pool of normal tissues, namely liver, pancreas, skin, bone marrow, resting PBMC, stomach and brain. Both libraries were prepared using the manufacturer's instructions with the following modifications: an EcoRI-NotI 5′ cDNA adapter was used instead of the provided reagent; the vector pcDNA3.1(+) (Invitrogen) was substituted for the pSPORT vector; and the ligated DNA molecules were transformed into ElectroMaxDH10B electrocompetent cells. Clones from the libraries were analyzed by restriction digest and sequencing to determine average insert size, quality of the library and complexity of the library. DNA was prepared from each library and digested.

[1314] The driver DNA was biotinylated and hybridized with the colon library tester DNA at a ratio of 10:1. After two rounds of hybridizations, streptavidin incubations and extractions, the remaining colon cDNAs were size-selected by column chromatography and cloned into the pCMV-Script vector from Stratagene. Clones from this subtracted library (referred to as CTCL-S 1) were characterized as described above for the unsubtracted libraries.

[1315] The determined cDNA sequences for 20 clones isolated from the CTCL-S1 library are provided in SEQ ID NO: 462-479, 628 and 629. Comparison of these sequences with those in the public databases, as described above, revealed no significant homologies to the sequences of SEQ ID NO: 476, 477 and 479. The remaining sequences showed some homology to previously identified genes.

[1316] In further studies, a cDNA library was prepared from a pool of mRNA from three metastatic colon adenocarcinomas derived from liver tissue samples. All samples were described as Duke's stage D. Conventional subtraction was performed as described above, using the DriverLibpcDNA3.1+ library described above as the driver. The resulting subtracted library (referred to as CMCL-S1) was characterized by isolating a set of clones for restriction analysis and sequencing.

[1317] The determined cDNA sequences for 7 clones isolated from the CMCL-S1 library are provided in SEQ ID NO: 480-486. Comparison of these sequences with those in the public databases revealed no significant homologies to the sequence of SEQ ID NO: 483. The sequences of SEQ ID NO: 480-482 and 484-486 were found to show some homology to previously identified genes.

### Example 5

### Expression of RA12-C884P Fusion Protein in E. coli

[1318] PCR was used to amplify the C884P cDNA (SEQ ID NO:1052) using the primers below and a colon cDNA library (648A). The PCR product was cloned to pCRX2 at EcoR I and Xho I site, downstream of 130 amino acid segment of the Ra12 protein. Three clones (Clone Identifier NO: 61698, 61699 and 61700) were all confirmed by DNA sequence. The cDNA encoding the Ra12-C884P fusion is set forth in SEQ ID NO:1084 and the corresponding predicted amino acid sequence is disclosed in SEQ ID NO:1085.

[1319] The following primers were used for PCR amplification of C884P:

[1320] 080300-A (Primer Identifier 7839) (SEQ ID NO:1088): 5′-cgagcgaattcatatgggtacgagtaagcaatg-3′ (5′ Eco RI site).

[1321] 080300-B (Primer ID 7840) (SEQ ID NO: 1089): 5′-gcgatgcctcgagttatttgttcccgatctggc-3′ (3′ Xho I site).

[1322] The predicted protein has the following features: Protein sequence information: Molecular Weight 36466.18 Daltons; 344 Amino Acids; 21 Strongly Basic (+) Amino Acids (K,R); 27 Strongly Acidic (−) Amino Acids (D,E); 144 Hydrophobic Amino Acids (A,I,L,F,W,V); 88 Polar Amino Acids (N,C,Q,S,T,Y); 6.165 Isolectric Point; −4.709 Charge at PH 7.0.

[1323] Mini-induction screening of Ra12-C884P in numerous E. coli hosts, using various temperature, culture media and concentrations of IPTG, showed a protein band at expected MW of 36.5 kDa, visible by western blot but not by SDS-PAGE/Coomassie staining. The best expression condition was in BLR(DE3)pLysS host and recombinant protein induced by IPTG at 30° C. for 2 hours.

### Example 6

### Expression of RA12-C888P Fusion Protein in E. Coli

[1324] PCR was used to amplify the ORF of C888P (SEQ ID NO:1076; Clone Identifier No: 37983) from a colon cDNA library (648A) using the following primers:

[1325] Sense Primer-080300-C (Primer ID7841) (SEQ ID 1090): 5′-gcatgcatgcggccgcacaagaggggaagtttagtgg-3′ (5′ Not I site)

[1326] Antisense Primer-080300-D (Primer ID7842) (SEQ ID NO:1091): 5′-gcgatgcctcgagtcagcttctcagaggtttgacttc-3′ (3′ Xho I site)

[1327] The PCR product was cloned into the pZeroBlunt vector (Invitrogen, Carlsbad, Calif.) and confirmed by DNA sequencing. The C888P insert was cut with Not I and Xho I and subcloned into pCRX2 linearized with the same two enzymes. A clone (clone identifier 66481) was confirmed by DNA sequencing. The cDNA sequence encoding the Ra12-C888P fusion protein (R.C888P) is disclosed in SEQ ID NO:1086 and the corresponding predicted amino acid sequence is disclosed in SEQ ID NO: 1087.

[1328] The predicted R.C888P protein has the following features: molecular weight 104429.77 Daltons; 958 Amino Acids; 78 Strongly Basic(+) Amino Acids (K,R); 116 Strongly Acidic(−) Amino Acids (D,E); 331 Hydrophobic Amino Acids (A,I,L,F,W,V); 260 Polar Amino Acids (N,C,Q,S,T,Y); 4.985 Isolectric Point: −34.173 Charge at PH 7.0 Multiple “mini” expression screens were performed to determine the optimal induction conditions. E. coli expression hosts were tested in various culture conditions, with notable full length expression but also multiple breakdown products. To test for reduction of breakdown product and maximize clean recombinant production, Tuner (DE3) C+RIL and C+RP cells were induced at varied IPTG concentrations. Coomassie stained SDS-PAGE showed a specifically induced band at about 100 kD and western blot confirmed with anti-6× his tag Ab. Western blot also showed no breakdown products at 0.1 mM IPTG concentration. Tuner (DE3) C+RP expression host grows best (high cell density) with optimal expression of R.C888P in 2× YS media at 25° C. induced with 0.1 mM IPTG at 25° C. for 3hr.

### Example 7

### Database Analysis of C794P cDNA Encoding Colon Tumor Protein

[1329] Database searches were performed with C794P (SEQ ID NOs:41, 127, 683, 691). Sequence similarity was seen to cDNA FLJ20063 and the RECC gene (SEQ ID NO: 1092). This RECC sequence is longer than the FLJ20063 cDNA, containing additional sequence at the 5′ end. The RECC sequence contains an ORF encoding a predicted protein of 512 amino acids (SEQ ID NO:1093). This RECC protein shares similarity with mouse cell surface antigen 114/A10. This mouse antigen was found in a hematopoetic progenitor cell line and is described as an intergral membrane protein with serine/threonine repeats at the N-terminus and 3 EGF-like cysteine repeats. It was also detected in a leukemia cell line and IL-3-dependent cell lines (J Biol. Chem. 1989. 264(11):6509-6514).

[1330] Results from the PSORTII protein analysis program (University of California-Berkeley, Berkeley, Calif.) suggest that RECC is a cell surface protein containing 1 transmembrane domain. PSORTII predicts a cleavable signal peptide from amino acids 1-17, one transmembrane domain, a C-terminal cytoplasmic tail, amino acids 446-512, and a 44.4% likelihood of extracellular localization. The IDENTIFY analysis program (Stanford University, Palo Alto, Calif.) predicts four EGF-type signatures CACVPGY and one rhesus blood group protein signature at stringency of one in 106 (no false positives expected).

### Example 8

### Microarray Expression Analysis of cDNAs Encoding Colon Tumor Polypeptides Isolated from a Serological Expression Library

[1331] mRNA expression levels of cDNA clones identified in the serological expression library described in Example 3 were analyzed by microarray as described in Example 1. Those clones with expression levels 2 fold or higher in tumor tissues as compared to normal tissues were further characterized by comparison with the most recent Genbank database. Those sequences that showed some degree of similarity to sequences in the database are summarized in Table 1. Those sequences that showed no significant similarity to known sequences in the database are summarized in Table 2. Disclosed herein are several full length cDNA and predicted amino acid sequences for genes provided in the results of Genbank searches. The full length cDNA sequences are set forth in SEQ ID NOs:1096-1099, 1101, 1103-1106, and 1111-1114, and the full length predicted amino acid sequences are set forth in 1102, 1107-1110, and 1115-1118. The clone, CT2-222, showed the most similarity to a murine gene (disclosed in SEQ ID NOs: 1113 (cDNA) and 1117 (amino acid)). The human homolog of this gene is disclosed in SEQ ID NOs:1114 (cDNA) and 1118 (amino acid).

TABLE 1
Microarray and Genbank search analysis of cDNAs isolated from a serological expression library:
Sequences that showed some similarity to sequences in Genbank

| | | | | Ratio of Median Values | | | | | | |
|---|---|---|---|---|---|---|---|---|---|---|
| SEQ | | Sequence | | Tumor/Normal Tissue | | | | | | |
| ID NO: | Clone Name | Identifier | GenBank ID | T/N | DA/N | DB/N | DC/N | DD/N | Met* | T/N-C |
| 171, | CT-53 | 24132 | Galectin-4 (secreted) | 3.2 | 2.4 | 5.4 | 2.1 | 4.5 | | 3.5 |
| 1096 | | | | | | | | | | |
| 181, | CT-126 | 25527 | GPI-anch. Surface mark 1 | — | — | 2.3 | — | — | | 2.4 |
| 1097 | | | | | | | | | | |
| 183, | CT-140 | 25537 | hAG-2/C (hAG-1)(secreted) | 7.6 | 4.2 | 10.6 | 3.8 | 8.9 | | 9.5 |
| 1098 | | | | | | | | | | |
| 186, | CT-148 | 25544 | Glucose Phosp. Isomerase | — | — | 2.1 | — | — | | — |
| 1099 | | | | | | | | | | |
| | CT2-104 | 41096 | beta IG-H3 (secreted) | 2.4 | 2 | 2.5 | 2.1 | 3.5 | | 2.4 |
| 665, | CT2-167 | 39819 | Keratin 19 (shed) | 3.4 | — | 3.7 | 2.3 | 3.9 | | 5.2 |
| 1111, | | | | | | | | | | |
| 1115 | | | | | | | | | | |
| 630 | CSE-2 | 35997 | Unkn (hAG-3) (secreted) | 5.6 | 5.3 | 6 | — | 6.6 | | 5.7 |
| 571, | CS1-104 | 31409 | Squalene epoxidase | — | — | 2.4 | — | 3.1 | | — |
| 1103, | | | | | | | | | | |
| 1107 | | | | | | | | | | |
| 573, 574, | CS1-106 | 31364 | Mad p2 | 2.2 | — | 2.4 | — | 3.8 | | 2.2 |
| 1104, | | | | | | | | | | |
| 1108 | | | | | | | | | | |
| 578, | CS1-123 | 31396 | Epith-spec trans fac. ESE-1b | 3.9 | — | 4.4 | 2.4 | 6 | | 8.5 |
| 1105, | | | | | | | | | | |
| 1109 | | | | | | | | | | |
| 587, | CS-152 | 32214 | Hu. Regenerating gene type | | | | | | | |
| 1069, | | | IV | | | | | | | |
| 1070 | | | | | | | | | | |
| 591, | CS1-160 | 32222 | KSA; adenocarc-assoc Ag | — | — | 2 | — | 3.4 | | 2.7 |
| 1106, | | | | | | | | | | |
| 1110 | | | | | | | | | | |

| | | | | | |
|---|---|---|---|---|---|
| 675, | CT2-222 | 39848 | Mu. valosin containing pro.; | 1.24 | **Very low overexpression on 13/38 tumors, |
| 1113, | | | Hu. homolog | | normals |
| 1117 | | | | | |
| 1101, | CT2- | 41099 | Hu. heat shock protein apg-2 | 1.08 | **Low to high overexpression on all tumors; Moderate OE |
| 1102 | 136; (identi- | (24115) | | | in N. thymus, low OE in N. lung, panc., b. marrow, |
| (161) | cal to CT- | | | | skel. muscle, skin, aorta, heart, act. PBMC, fetal |
| | 17) | | | | |
| 1112, | CT2-147 | 41100 | Hu. Fc fragment of IgG | 1.87 | **Moderate OE in 4, low OE in 8 tumors; low OE in 2, |
| 1116, | | | binding protein (FCGBP) | | mod. OE in N. b. marrow, co |
| 172 | PACSINA-6 | (24595) | Hu. PACSIN2 | 1.57 | **Low-moderate OE in 34/37 tumors; Moderate OE in |
| | | | | | N. colon, lung, b. marrow, aorta, skin act. PBMC |

*Met ratio of means
**Clones were picked based upon their low overexpression in normals, not necessariliy due to their levels of overexpression positives.

[1332] TABLE 2
Microarray and Genbank search analysis of cDNAs isolated from a serological expression library:
Sequences that showed no significant similarity to known sequences in Genbank

| | | | | Ratio of Median Values | | | | | | |
|---|---|---|---|---|---|---|---|---|---|---|
| SEQ | Clone | Sequence | | Tumor/Normal Tissue | | | | | | |
| ID NO: | Name | Identifier | GenBank ID | T/N | DA/N | DB/N | DC/N | DD/N | Met* | T/N-C |
| 193, 623, | CT-594 | 27540 | Mus musculus 10 day old male pancreas | | | | | | 40 | |
| 1082, | | | cDNA (Mouse EST hits: 113 embryonic, fetal | | | | | | | |
| 1083 | | | newborn, etc) | | | | | | | |

| | | | | |
|---|---|---|---|---|
| 1100 | CT2-283 | 41103 | 1.59 | **Low OE in 35/37 tumors; low OE in N.colon, b.marrow, |
| | | | | skin, aorta |

*Met ratio of means
**Clones were picked based upon their low overexpression in normals, not necessariliy due to their levels of overexpression positives.

### Example 9

### Northern and Real Time PCR Expression Analysis of the C799P Colon Tumor Antigen

[1333] Searches of the C799P sequence (which relates to Clone Identifier No 14308 and the cDNA sequences disclosed in SEQ ID NOs:40, 132, 684, and 690; and the amino acid sequences disclosed in SEQ ID NOs:686 and 692) were performed against Genbank, human EST and Geneseq databases. A match was found against the 6410 bp NADPH thyroid oxidase 2 (THOX2) mRNA (SEQ ID NO: 1094). An ORF of 1548 amino acids was identified (SEQ ID NO:1095). PSORTII protein motif prediction analysis suggests the protein contains a cleavable signal peptide and 9 transmembrane domains.

[1334] mRNA expression levels were further analyzed using real-time PCR. Real-time PCR (see Gibson et al., Genome Research 6:995-1001, 1996; Heid et al., Genome Research 6:986-994, 1996) is a technique that evaluates the level of PCR product accumulation during amplification. This technique permits quantitative evaluation of mRNA levels in multiple samples. Briefly, mRNA was extracted from tumor and normal tissue and cDNA was prepared using standard techniques. Real-time PCR was performed using a Perkin Elmer/Applied Biosystems (Foster City, CA) 7700 Prism instrument. Matching primers and fluorescent probes were designed for C799P using the primer express program provided by Perkin Elmer/Applied Biosystems (Foster City, Calif.). Optimal concentrations of specific and control (e.g., β-actin) primers and probes were determined. To quantitate the amount of specific RNA in the samples (see Table 3), a standard curve was generated using a plasmid containing C799P. Standard curves were generated using the Ct values determined in the real-time PCR, which are related to the initial cDNA concentration used in the assay. Standard dilutions ranging from 10-10⁶ copies of the gene of interest are generally sufficient. In addition, a standard curve was generated for the control sequence. This permitted standardization of initial RNA content of the tissue samples to the amount of control for comparison purposes. The real-time data showed that C799P is overexpressed in 12 of 31 colon tumor samples when compared to expression seen in normal tissues. Some expression of C799P was observed in normal prostate, lung, pancreas, stomach, salivary gland, thyroid, and esophagus, although expression levels were markedly lower than those seen in colon tumor samples. Overexpression was also observed in lung and ovarian tumor samples. These data indicate that C799P has applicability in diagnostic and/or immunotherapeutic uses.

[1335] Northern analysis confirmed the real-time and earlier microarray data which showed C799P to be overexpressed in colon tumor.

### Example 10

### Full-Length Cloning of C884P Coding Sequence and Expression of C884P-His and MAPS-C884P-His in HEK293T Cells

[1336] The full-length C884P protein coding sequence was cloned by RT-PCR. Standard RT-PCR was performed to clone the C884P ORF (including the signal sequence) into the TA cloning vector. The mRNA was isolated from a colon tumor, reverse transcribed to cDNA and used as template for PCR. The primers used for the RT-PCR have the following sequence:

[1337] C884P-HisTag-AW175: (sense primer) Id=10468 (SEQ ID NO: 1123) 5′ ggagctagcgccgccATGGCAGGTGTGAGTGCCTG

[1338] C884P-HisTag-AW176: (antisense primer) Id=10469 (SEQ ID NO: 1124) 5′ gccggatccTCAatggtgatggtgatggtgTTTGTTCCCGATCTGGCAATACAG

[1339] Six His residues were built into the 3′ primer (C884P-HisTag-AW176) immediately upstream of the stop codon. The cloned C884P gene was confirmed by DNA sequencing.

[1340] Full-length C884 with a C-terminal His tag was cloned into JA4304 at Nhe I and BamH I sites using standard molecular biology techniques (cDNA and amino acid sequences set forth in SEQ ID NOs: 1120 and 1122, respectively). Similarly, a fusion construct of MAPS-C884P-CHisTag was also made (cDNA and amino acid sequences set forth in SEQ ID NOs: 1119 and 1121, respectively). Both constructs were confirmed by DNA sequencing.

[1341] Different amounts (0.1 μg, 0.33 μg, 1 μg and 2 μg) of purified plasmids (namely, C884P-C6His, MAPS-C884P-C6His and JA4304 control) were used to transfect HEK293 cells. Cells were harvested 48h later, and both the supernatant and cell lysate fractions were examined for the expression of C884P-CHisTag or MAPS-C884P-CHisTag proteins by western blots using anti-MAPS antibody and anti-C-terminal His tag antibody. No protein expression was observed by western blots in the supernatant fraction for all three transfections using either anti-MAPS antibody or anti C-terminal Histag antibody. With the anti-MAPS antibody, clean western bands were observed in a concentration dependent manner in the cell lysate transfected with MAPS-C884 fusion construct.

### Example 11

### Full-Length DNA Sequence And Predicted ORFs Identified for Colon Tumor Antigen CT2-283

[1342] The full-length DNA sequence and four protein sequences comprising the most likely open reading frames to be encoded by the DNA sequence for CT2-283 (also referred to as clone ID 41103; partial sequence disclosed in SEQ ID NO:1100) were determined. As described in Example 8, Table 2, this clone was isolated from a serological expression library and was shown to be overexpressed in colon tumors as compared to normal tissues. The full-length DNA sequence is set forth in SEQ ID NO:1125. The 4 predicted ORFs are set forth in SEQ ID NOs:1126-1129. The full-length sequence was searched against public databases and showed some degree of similarity to the Genbank clone Hu. BAC clone RP1-567018; cDNA: FLJ23117 fis cDNA FLJ13871 fis, clone:RP11-679118.

### Example 12

### Immunogenicity of C884P DNA and MAPS-C884P DNA Fusion Contructs in Mice

[1343] As described in Example 10, MAPS drives the protein expression level of C884P in HEK293 cells. Discloses herein are results showing that MAPS affects the immune response of mice to C884P. In particular, mice immunized with MAPS-C884P DNA gave higher C884P-specific immune response (antibody and CD4) than mice immunized with C884P DNA. Further, FACS analysis with the mice serum showed that C884P is localized to the cell surface of HEK293 transfected with C884P DNA and MAPS-C884P DNA.

[1344] DNA Immunizations:

[1345] C57BL/6 mice were immunized with C884P and MAPS-C884P. C57BL/6 female mice (10 total) were immunized with DNA at 8.5 weeks old. The route of immunization was intramuscular, anterior tibialus with a dose of 100 μg DNA per mouse (50 μl of 1 mg/ml DNA per muscle, 100 μl total per mouse) The immunogens used for the experiment were as follows: C884P DNA (3 mice), MAPS-C884P DNA (3 mice), JA4304 (GSK) vector alone control (4 mice). The mice were given 3 immunizations at approximately 3 week intervals (time 0, May 9, 2001, time 1, May 30, 2001, time 2, Jun. 22, 2001, and time 3 (harvest) Jul. 16, 2001).

[1346] Immune Response of DNA-Vaccinated Mice:

[1347] Antibody Response: The IgG1 and IgG2a levels in the mice sera were determined by ELISA method using plates coated with MAPS-C884P protein purified from E. coli expression system. Briefly, MAPS-C884P protein was coated on the 96 well plates ovenight at 4° C. Next day, the plates were washed and blocked with BSA in PBS-T for 1 h at room temperature. After the wash, the mouse serum were added at different dilutions and incubated for 1 h at room temperature. The plates were then washed and HRP-conjugated goat anti-mouse IgG1 or IgG2a was added. After 30 minutes, the plates were washed, developed and read. Two out of three mice immunized with MAPS-C884P gave higher IgG2a. A weaker IgG1 in 1 of 3 mice immunized with C884P was observed.

[1348] CD4 Proliferative Response:

[1349] Splenocytes harvested from the spleens of immunized mice were incubated in 96 well plates at 37° C. for 72 hours in the presence of recombinant MAPS-C884P protein. 3×10⁵ T cells were stimulated with dilutions of recombinant E. Coli derived MAPS-C884P protein. After the 72 hour incubation, cells were pulsed with tritiated thymidine, incubated for 18 hours, and counted. T cells from MAPS-C884P immunized mice showed greater proliferative responses than T cells from C884P immunized mice and from naive mice. Stimulations with 0.6 μg of protein showed this pattern most clearly.

[1350] Cytokine Response:

[1351] The INFγ levels in the supernatants of splenocytes stimulated with MAPS-C884P were determined by ELISA assay. 3×10⁶ T cells from each mouse were incubated for 72 hours with 1.2 μg of purified protein. Supernatants were harvested and used in a mouse INFγ assay. The results indicate that T cells from mice immunized with C884P and MAPS-C884P both produce INFγ as compared to T cells from control mice.

[1352] FACS Analysis:

[1353] HEK293 cells were transfected with JA4304, C884P or MAPS-C884P DNA for 2 days. The cells was then washed and stained with different mice sera for 30 min on ice. Following a wash, FITC-conjugated goat anti-mouse IgG antibody was added for 20 min on ice. Finally, the cells were washed, resuspended in staining buffer supplemented with propidium iodide to stain dead cells and analyzed by flow cytometry. The results indicated positive surface staining for HEK293 transfected with either MAPS-C884P and C884P, suggesting that C884P is localized at cell surface.

### Example 13

### Generation of Polyclonal Antibodies Against the RA12-C888P Colon Tumor Antigen

[1354] Production and purification of antigen used for antibody generation: Ra12-C888P was expressed in an E. coli recombinant expression system as described in Example 6. The cDNA sequence encoding the Ral2-C888P fusion protein (R.C888P) is disclosed in SEQ ID NO:1086 and the corresponding predicted amino acid sequence is disclosed in SEQ ID NO:1087. The E. coli expressing Ra12-C888P were grown overnight in LB Broth with the appropriate antibiotics at 37° C. in a shaking incubator. The next morning, 10 ml of the overnight culture was added to 500 ml of 2× YT plus appropriate antibiotics in a 2L-baffled Erlenmeyer flask. When the optical density (at 560 nanometers) of the culture reached 0.4-0.6 the cells were induced with IPTG (1 mM). Four hours after induction with IPTG, the cells were harvested by centrifugation. The cells were then washed with phosphate buffered saline and centrifuged again. The supernatant was discarded and the cells were either frozen for future use or immediately processed.

[1355] Twenty milliliters of lysis buffer was added to the cell pellets and vortexed. To break open the E. coli cells, this mixture was then run through the French Press at a pressure of 16,000 psi. The cells were then centrifuged again and the supernatant and pellet were checked by SDS-PAGE for the partitioning of the recombinant protein. For proteins that localized to the cell pellet, the pellet was resuspended in 10 mM Tris pH 8.0, 1% CHAPS and the inclusion body pellet was washed and centrifuged again. This procedure was repeated twice more. The washed inclusion body pellet was solubilized with either 8 M urea or 6 M guanidine HCI containing 10 mM Tris pH 8.0 plus 10 mM imidazole. The solubilized protein was added to 5 ml of nickel-chelate resin (Qiagen) and incubated for 45 min to 1 hour at room temperature with continuous agitation. After incubation, the resin and protein mixture were poured through a disposable column and the flow through was collected. The column was then washed with 10-20 column volumes of the solubilization buffer. The antigen was then eluted from the column using 8M urea, 10 mM Tris pH 8.0 and 300 mM imidazole and collected in 3 ml fractions. A SDS-PAGE gel was run to determine which fractions to pool for further purification. As a final purification step, a strong anion exchange resin such as Hi-Prep Q (Biorad) was equilibrated with the appropriate buffer and the pooled fractions from above were loaded onto the column. The antigen was eluted off of the column with an increasing salt gradient. Fractions were collected as the column was run and another SDS-PAGE gel was run to determine which fractions from the column to pool. The pooled fractions were dialyzed against 10 mM Tris pH 8.0. This material was then submitted to Quality Control for final release. The release criteria were purity as determined by SDS-PAGE or HPLC, concentration as determined by Lowry assay or Amino Acid Analysis, identity as determined by amino terminal protein sequence, and endotoxin level was determined by the Limulus (LAL) assay. The proteins were then vialed after filtration through a 0.22-micron filter and the antigens were frozen until needed for immunization.

[1356] Generation of Polyclonal Antisera: 400 micrograms of Ra12C888P antigen was combined with 100 micrograms of muramyldipeptide (MDP). Equal volume of Incomplete Freund's Adjuvant (IFA) was added and then mixed and injected into a rabbit. After four weeks, the rabbit was boosted with 200 micrograms of antigen mixed with an equal volume of IFA. Thereafter the rabbit was boosted I.V. with 100 micrograms of antigen every four weeks. Seven days following each boost the animal was bled. Incubating the blood at 4° C. for 12-24 hours followed by centrifugation generated sera.

[1357] Polyclonal Antibody Purification:

[1358] The polyclonal anti-sera was loaded onto an Ra12-C888P affinity column. The antigen-specific antibodies were eluted with 0.2M glycine and neutralized. Then these antigen-specific antibodies were loaded on an Ra12 affinity column to remove Ra12 antibody activity. The flow through from this column was collected, concentrated and then characterized by ELISA.

[1359] Characterization of polyclonal antisera: 96 well plates were coated with antigen by incubating with 50 microliters (typically 1 microgram/microliter) at 4° C. for 20 hours. 250 microliters of BSA blocking buffer was added to the wells and incubated at room temperature for 2 hours. Plates were washed 6 times with PBS/0.1% Tween. Rabbit sera and purified rabbit sera were diluted in PBS/0.1% Tween/0.1%BSA. 50 microliters of diluted antibodies were added to each well and incubated at RT for 30 minutes. Plates were washed as described above before 50 microliters of goat anti-rabbit horse radish peroxidase (HRP) at a 1:10000 dilution was added and incubated at RT for 30 minutes. Plates were washed as described above and 100 microliters of TMB Microwell Peroxidase Substrate was added to each well. Following a 15-minute incubation in the dark at room temperature, the colorimetric reaction was stopped with 100 microliters of IN H₂SO₄ and read immediately at 450 nm. As shown in Table 3, the polyclonal antibody showed immunoreactivity to the Ra12-C888P fusion protein and Ra12 protein. The purified polyclonal antibody also shows immunoreactivity to both proteins but the Ra12 reactivity is considerably lower.

TABLE 3
ELISA results demonstrating antibody reactivity to C888P

| Antigen | | Antibody Dilutions | | | | | | | | | | | |
|---|---|---|---|---|---|---|---|---|---|---|---|---|---|
| on Plate | Sera Sample | 1:1000 | 1:2000 | 1:4000 | 1:8000 | 1:16000 | 1:32000 | 1:64000 | 1:128000 | 1:256000 | 1:512000 | 1:1024000 | 0 |
| RC888P | Preimmune sera | 0.09 | 0.06 | 0.06 | 0.06 | 0.06 | 0.06 | 0.06 | 0.06 | 0.06 | 0.06 | 0.06 | 0.06 |
| | | 0.06 | 0.05 | 0.05 | 0.06 | 0.05 | 0.05 | 0.05 | 0.06 | 0.06 | 0.05 | 0.06 | 0.06 |
| | Average | 0.07 | 0.06 | 0.06 | 0.06 | 0.06 | 0.06 | 0.06 | 0.06 | 0.06 | 0.06 | 0.06 | 0.06 |
| | anti-RC888P | 1.86 | 1.81 | 1.73 | 1.55 | 1.25 | 0.98 | 0.61 | 0.37 | 0.23 | 0.14 | 0.09 | 0.06 |
| | poly (6408L): | 2.00 | 1.77 | 1.67 | 1.55 | 1.22 | 0.90 | 0.61 | 0.33 | 0.23 | 0.12 | 0.10 | 0.06 |
| | Average | 1.93 | 1.79 | 1.70 | 1.55 | 1.24 | 0.94 | 0.61 | 0.35 | 0.23 | 0.13 | 0.09 | 0.06 |
| | | Purified Antibody Concentration (μg/ml) | | | | | | | | | | | |
| | | 1.0 | 0.50 | 0.25 | 0.13 | 0.063 | 0.031 | 0.016 | 0.0078 | 0.0039 | 0.0020 | 0.0010 | 0 |
| | affi-pure, Ra12- | 1.83 | 1.55 | 1.33 | 1.01 | 0.61 | 0.37 | 0.21 | 0.11 | 0.09 | 0.07 | 0.06 | 0.06 |
| | free anti-RC888P | 1.80 | 1.56 | .134 | 0.99 | 0.67 | 0.39 | 0.22 | 0.12 | 0.09 | 0.06 | 0.06 | 0.09 |
| | poly | | | | | | | | | | | | |
| | Average | 1.81 | 1.55 | 1.33 | 1.00 | 0.64 | 0.38 | 0.21 | 0.12 | 0.09 | 0.06 | 0.06 | 0.08 |
| Antigen | | Antibody Dilutions | | | | | | | | | | | |
| on Plate | Sera Sample | 1:1000 | 1:2000 | 1:4000 | 1:8000 | 1:16000 | 1:32000 | 1:64000 | 1:128000 | 1:256000 | 1:512000 | 1:1024000 | 0 |
| Ra12 | Preimmune sera | 0.18 | 0.15 | 0.15 | 0.15 | 0.15 | 0.14 | 0.14 | 0.15 | 0.15 | 0.16 | 0.16 | 0.13 |
| | | 0.18 | 0.17 | 0.15 | 0.15 | 0.14 | 0.13 | 0.13 | 0.14 | 0.15 | 0.16 | 0.16 | 0.09 |
| | Average | 0.18 | 0.16 | 0.15 | 0.15 | 0.15 | 0.14 | 0.13 | 0.14 | 0.15 | 0.16 | 0.16 | 0.11 |
| | anti-RC888P | 1.84 | 1.83 | 1.66 | 1.38 | 1.05 | 0.66 | 0.44 | 0.31 | 0.22 | 0.21 | 0.19 | 0.16 |
| | poly (6408L): | 1.98 | 1.79 | 1.62 | 1.36 | 1.02 | 0.67 | 0.41 | 0.31 | 0.26 | 0.19 | 0.20 | 0.18 |
| | Average | 1.91 | 1.81 | 1.64 | 1.37 | 1.03 | 0.67 | 0.42 | 0.31 | 0.24 | 0.20 | 0.20 | 0.17 |
| | | Purified Antibody Concentration (μg/ml) | | | | | | | | | | | |
| | | 1.0 | 0.50 | 0.25 | 0.13 | 0.063 | 0.031 | 0.016 | 0.0078 | 0.0039 | 0.0020 | 0.0010 | 0 |
| | affi-pure, Ra12- | 0.45 | 0.31 | 0.21 | 0.18 | 0.16 | 0.12 | 0.13 | 0.14 | 0.17 | 0.16 | 0.18 | 0.16 |
| | free anti-RC888P | 0.48 | 0.33 | 0.22 | 0.19 | 0.18 | 0.12 | 0.12 | 0.12 | 0.15 | 0.14 | 0.14 | 0.14 |
| | poly | | | | | | | | | | | | |
| | Average | 0.47 | 0.32 | 0.21 | 0.18 | 0.17 | 0.12 | 0.13 | 0.13 | 0.16 | 0.15 | 0.16 | 0.15 |

### Example 14

### Analysis of C888P Tissue Expression by Immunohistochemistry (IHC)

[1360] To determine if C888P (SEQ ID NO:1076) was specifically expressed in colon cancer as compared to normal colon tissue, immunohistochemistry (IHC) analysis was performed on a normal colon and colon cancer tissue sections. Tissue samples were fixed in formalin solution for 12-24 hrs and embedded in paraffin before being sliced into 8 micron sections. Steam heat induced epitope retrieval (SHIER) in 0.1 M sodium citrate buffer (pH 6.0) was used for optimal staining conditions. Sections were incubated with 10% serum/PBS for 5 minutes. Primary antibody was added to each section for 25 minutes followed by 25 minute incubation with anti-rabbit biotinylated antibody. Endogenous peroxidase activity was blocked by three 1.5 minute incubations with hydrogen peroxidase. The avidin biotin complex/horse radish peroxidase (ABC/HRP) system was used along with DAB chromogen to visualize antigen expression. Slides were counterstained with hematoxylin to visualize cell nuclei.

[1361] IHC analysis indicated that the antibodies generated against C888P as described in Example 13 are immunoreactive with colon cancer tissue. IHC staining indicated that expression of C888P is plasma membrane associated in both colon cancer and normal colon tissue. However, staining patterns between normal colon and colon tumor tissue are distinct. In normal colon tissue, expression of C888P is localized to the epithelial cell population. However, in colon cancer tissue, the anti-C888P staining indicated a uniform expression across the cancerous tissue. Thus, these antibodies can be used in IHC to differentiate normal colon from colon cancer tissue.

[1362] C888P expression was further analyzed in a variety of tissues including colon cancer sections and normal tissues. This analysis confirmed C888P positive membrane staining in 7 of 7 colon cancer samples. Positive membrane staining was also observed in normal colon, sigmoid colon, duodenum, ileum, appendix, and gallbladder. Marginal staining was seen in normal salivary gland and stomach. The following normal tissues were all negative for C888P staining: nasal mucosa, liver, heart, lung, esophagus, pancreas, antrum of stomach, seminal vesicle, testis, epidydimis, thyroid, breast, endometrium-proliferation, endometrium-secretory, myometrium, kidney, adrenal medulla, spleen, skeletal muscle, brain-white and gray matter, and spinal cord.

[1363] Thus, IHC analysis confirms the expression of C888P in colon cancer and normal colon tissues as compared to a variety of other normal tissues and further validates this antigen as a marker for colon cancer.

### Example 15

### mRNA Expression Analysis of the C888P Colon Tumor Antigen using Real Time PCR

[1364] The mRNA expression profile of C888P (full-length cDNA set forth in SEQ ID NO:1076, partial sequence set forth in SEQ ID NO:21, also referred to as L-Cadherin) was analyzed by real-time PCR as described in Example 9. Real-time PCR results showed overexpression of C888P in over 90% of colon tumors and in normal colon. Some expression was also observed in normal small intestine but no expression was observed in any other normal tissue examined (kidney, spleen, heart, aorta, pancreas, stomach, skin, breast, thymus, bone, skeletal muscle, trachea, bronchus, cartilage, pituitary, retina, cerebellum, ureter, spinal cord, brain, bladder, esophagus, liver, activated PBMC, rested PBMC, lung, adrenal gland, salivary gland, bone marrow, thyroid). These data confirm microarray results that showed colon-specific expression of C888P. C888P mRNA expression was also analyzed in matched pair (normal versus tumor) tissues. These results confirm expression of C888P in normal colon and colon tumor tissues. Real-time PCR also showed increased expression of C888P in diverticulous tissues as compared to normal tissue.

### Example 16

### Synthesis of Polypeptides

[1365] Polypeptides may be synthesized on a Perkin Elmer/Applied Biosystems Division 430A peptide synthesizer using FMOC chemistry with HPTU (O-Benzotriazole-N,N,N′,N′-tetramethyluronium hexafluorophosphate) activation. A Gly-Cys-Gly sequence may be attached to the amino terminus of the peptide to provide a method of conjugation, binding to an immobilized surface, or labeling of the peptide. Cleavage of the peptides from the solid support may be carried out using the following cleavage mixture: trifluoroacetic acid:ethanedithiol:thioanisole:water:phenol (40:1:2:2:3). After cleaving for 2 hours, the peptides may be precipitated in cold methyl-t-butyl-ether. The peptide pellets may then be dissolved in water containing 0.1% trifluoroacetic acid (TFA) and lyophilized prior to purification by C18 reverse phase HPLC. A gradient of 0%-60% acetonitrile (containing 0.1% TFA) in water (containing 0.1% TFA) may be used to elute the peptides. Following lyophilization of the pure fractions, the peptides may be characterized using electrospray or other types of mass spectrometry and by amino acid analysis.

[1366] From the foregoing it will be appreciated that, although specific embodiments of the invention have been described herein for purposes of illustration, various modifications may be made without deviating from the spirit and scope of the invention. Accordingly, the invention is not limited except as by the appended claims.

What is claimed:

1. An isolated polynucleotide comprising a sequence selected from the group consisting of:
(a) sequences provided in SEQ ID NOs:1-121, 123-197, 205-630, 632-684, 686, 690-691, 694-1058, 1069, 1071-1076, 1082, 1084, 1086, 1092, 1094, 1096-1101, 1103-1106, 1111-1114, 1119, 1120, and 1125;
(b) complements of the sequences provided in SEQ ID NOs: 1-121, 123-197, 205-630, 632-684, 686, 690-691, 694-1058, 1069, 1071-1076, 1082, 1084, 1086, 1092, 1094, 1096-1101, 1103-1106, 1111-1114, 1119, 1120, and 1125;
(c) sequences consisting of at least 20 contiguous residues of a sequence provided in SEQ ID NOs:1-121, 123-197, 205-630, 632-684, 686, 690-691, 694-1058, 1069, 1071-1076, 1082, 1084, 1086, 1092, 1094, 1096-1101, 1103-1106, 1111-1114, 1119, 1120, and 1125;
(d) sequences that hybridize to a sequence provided in SEQ ID NOs:1-121, 123-197, 205-630, 632-684, 686, 690-691, 694-1058, 1069, 1071-1076, 1082, 1084, 1086, 1092, 1094, 1096-1101, 1103-1106, 1111-1114, 1119, 1120, and 1125, under moderately stringent conditions;
(e) sequences having at least 75% identity to a sequence of SEQ ID NOs:1-121, 123-197, 205-630, 632-684, 686, 690-691, 694-1058, 1069, 1071-1076, 1082, 1084, 1086, 1092, 1094, 1096-1101, 1103-1106, 1111-1114, 1119, 1120, and 1125;
(f) sequences having at least 90% identity to a sequence of SEQ ID NOs:1-121, 123-197, 205-630, 632-684, 686, 690-691, 694-1058, 1069, 1071-1076, 1082, 1084, 1086, 1092, 1094, 1096-1101, 1103-1106, 1111-1114, 1119, 1120, and 1125; and
(g) degenerate variants of a sequence provided in SEQ ID NOs:1-121, 123-197, 205-630, 632-684, 686, 690-691, 694-1058, 1069, 1071-1076, 1082, 1084, 1086, 1092, 1094, 1096-1101, 1103-1106, 1111-1114, 1119, 1120, and 1125.

2. An isolated polypeptide comprising an amino acid sequence selected from the group consisting of:
(a) sequences encoded by a polynucleotide of claim 1;
(b) sequences having at least 70% identity to a sequence encoded by a polynucleotide of claim 1;
(c) sequences having at least 90% identity to a sequence encoded by a polynucleotide of claim 1;
(d) sequences set forth in SEQ ID NOs:122, 198-204, 631, 685, 687, 692, 693, 1059-1068, 1070, 1077-1081, 1083, 1085, 1087, 1093, 1095, 1102, 1107-1110, 1115-1118, 1121, 1122, and 1126-1129;
(e) sequences having at least 70% identity to a sequence set forth in SEQ ID NOs:122, 198-204, 631, 685, 687, 692, 693, 1059-1068, 1070, 1077-1081, 1083, 1085, 1087, 1093, 1095, 1102, 1107-1110, 1115-1118, 1121, 1122, and 1126-1129; and
(f) sequences having at least 90% identity to a sequence set forth in SEQ ID NOs:122, 198-204, 631, 685, 687, 692, 693, 1059-1068, 1070, 1077-1081, 1083, 1085, 1087, 1093, 1095, 1102, 1107-1110, 1115-1118, 1121, 1122, and 1126-1129.

3. An expression vector comprising a polynucleotide of claim 1 operably linked to an expression control sequence.

4. A host cell transformed or transfected with an expression vector according to claim 3.

5. An isolated antibody, or antigen-binding fragment thereof, that specifically binds to a polypeptide of claim 2.

6. A method for detecting the presence of a cancer in a patient, comprising the steps of:
(a) obtaining a biological sample from the patient;
(b) contacting the biological sample with a binding agent that binds to a polypeptide of claim 2;
(c) detecting in the sample an amount of polypeptide that binds to the binding agent; and
(d) comparing the amount of polypeptide to a predetermined cut-off value and therefrom determining the presence of a cancer in the patient.

7. A fusion protein comprising at least one polypeptide according to claim 2.

8. An oligonucleotide that hybridizes to a sequence recited in SEQ ID NOs:1-121, 123-197, 205-630, 632-684, 686, 690-691, 694-1058, 1069, 1071-1076, 1082, 1084, 1086, 1092, 1094, 1096-1101, 1103-1106, 1111-1114, 1119, 1120, and 1125, under moderately stringent conditions.

9. A method for stimulating and/or expanding T cells specific for a tumor protein, comprising contacting T cells with at least one component selected from the group consisting of:
(a) polypeptides according to claim 2;
(b) polynucleotides according to claim 1; and
(c) antigen-presenting cells that express a polynucleotide according to claim 1, under conditions and for a time sufficient to permit the stimulation and/or expansion of T cells.

10. An isolated T cell population, comprising T cells prepared according to the method of claim 9.

11. A composition comprising a first component selected from the group consisting of physiologically acceptable carriers and immunostimulants, and a second component selected from the group consisting of:
(a) polypeptides according to claim 2;
(b) polynucleotides according to claim 1;
(c) antibodies according to claim 5;
(d) fusion proteins according to claim 7;
(e) T cell populations according to claim 10; and
(f) antigen presenting cells that express a polypeptide according to claim 2.

12. A method for stimulating an immune response in a patient, comprising administering to the patient a composition of claim 11.

13. A method for the treatment of a cancer in a patient, comprising administering to the patient a composition of claim 11.

14. A method for determining the presence of a cancer in a patient, comprising the steps of:
(a) obtaining a biological sample from the patient;
(b) contacting the biological sample with an oligonucleotide according to claim 8;
(c) detecting in the sample an amount of a polynucleotide that hybridizes to the oligonucleotide; and
(d) compare the amount of polynucleotide that hybridizes to the oligonucleotide to a predetermined cut-off value, and therefrom determining the presence of the cancer in the patient.

15. A diagnostic kit comprising at least one oligonucleotide according to claim 8.

16. A diagnostic kit comprising at least one antibody according to claim 5 and a detection reagent, wherein the detection reagent comprises a reporter group.

17. A method for inhibiting the development of a cancer in a patient, comprising the steps of:
(a) incubating CD4+ and/or CD8+ T cells isolated from a patient with at least one component selected from the group consisting of: (i) polypeptides according to claim 2; (ii) polynucleotides according to claim 1; and (iii) antigen presenting cells that express a polypeptide of claim 2, such that T cell proliferate;
(b) administering to the patient an effective amount of the proliferated T cells,
and thereby inhibiting the development of a cancer in the patient.

The application's sequence listing, which the Patent Office published only in electronic form, follows.

SEQUENCE LISTING (1129 sequences)

SEQ ID NO: 1 - DNA, 458 bp, Homo sapiens
  misc_feature 1: n = A,T,C or G
ncaggtctggcggcacctgtgcactcagccgtcgatacactggtcgattgggacagggaagacgatgtggttttcagggaggcccagagatttggagaagcggatgaagttctcctttagttccgaagtcagctccttggttctcccgtagagggtgatcttgaagtactccctgttttgagaaactttcttgaagaacaccatagcatgctggttgtagttggtgctcaccactcggacgaggtaactcgttaatccagggtaactcttaatgttgcccagcgtgaactcgccgggctggcaacctggaacaaaagtcctgatccagtagtcacacttctttttcctaaacaggacggaggtgacattgtagctcttgtcttctttcagctcatagatggtggcatacatcttttgcgggtctttgtcttctctgagaattgcattccctgccagga

SEQ ID NO: 2 - DNA, 423 bp, Homo sapiens
cagggtccataggtgatccgcaactctcgagcatttatatacaatagcaaatcatccagtgtgttgtacagtctataatactccaacagtctcccatctgtattcaatggcgccacccaatacagtcctttgtttggatgctggggagagtaatccctaccccaagcaccatatagataagaaaaccctctccagttgagctgaaccacagacggtttgctgatgttcaccacaccaccatgaccacagctccctggagtgggaggagggtggacgacaggggtgttttgatctttagaggcttcacactctttcagcttggtcttcagagccacgatttctcggcgaatggcaaggacattgtttttgtctagtgtctcaagcttctctaccaagagagtcatatttcttatctccacctcc

SEQ ID NO: 3 - DNA, 538 bp, Homo sapiens
ggtctgtccaatggcaacaggaccctcactctaytcartgtcacaagraatgayrcagsamsctayraatgtgaaayccagaacccagtgagtgccarscgcagtgayycagtcatcctgaatgtcctctatggcccrgatgmccccaccatttcccctctaaacacatmttaccgwycaggggaaaatctgaacctctcctgccacgcagcctctaacccacctgcacagtactcttggtttrtcaatgggactttccagcaatccacmcaagagctctttatccccaacatcactgtgaataatagyggatcctatacgtgccaagcccataactcagmcactggcctcaataggaccacagtcacgacgatcacagtctatgcaagagccacccaaacccttcatcaccagcaacaactccaaccccgtggaggatgaggatgctgtagccttaacctgtgaacctgagattcagaacacaacctacctgtggtgggtaaataatcagagcctcccggtcagtcccaggctgcag

SEQ ID NO: 4 - DNA, 309 bp, Homo sapiens
tggtaasccaaaaagatgctggggcagattgtggacaagtagaagaacctccttcccctctgcgaacattgaacggcgtggattcaatagtgagcttggcagtggtgggcgggttccagaaggttagaagtgaggctgtgagcaggagcccctgccaggggatvcacgcamtctgtggggaggggctgagrggdgwcyccatggtctctgctgtctgctctgtcctcctctgtggagaagagcttgagctccaggaacgctttgrtcavggctgcctgtgacctytgctctgbtctgcctgcccgggcg

SEQ ID NO: 5 - DNA, 412 bp, Homo sapiens
gtccaatggcaacaggacccctcacttctattcaatgtcacaagaaatgacgcaagagcctatgtatgtggaatccagaactkcagtgagtgcaaaccgcagtgacccagtcaccctggatgtcctctatgggccagacascccccatcatttcccccccagactcgtcttacctttcgggagcgaacctcaacctctcctgccactcggcctctaacccatccccgcagtattcttggckgtatcaatgggataccgcagcaacacacacaagttctctttatcgccaaaatcacgccaaataataacgggacctatgcctgttttgtctctaacttggctactggcccgcaataattccatagtcaagagcatcacagtcttctgcatctggaacttctcctggtcttct

SEQ ID NO: 6 - DNA, 332 bp, Homo sapiens
gtgcaagggctttacaaaaactgtgccagtkrcttctycatgwsrcwrgatctgacttkattsaygttktatgagsysyasaatmctgawgctcmttytssakgrwsttckgsatmrgcagtsrattcsacatttgggrtakrtymtctctsgaagysamtgtcakgcagtgrcayccwrgkktcwgcwtgcwgtgrgttamcakcmwtrywtagkgsgmayatratttaramrgtayakcymtctcmctcytycmccaywtgcwcaassmkcacacctcggccgcgaccacgctaagcccgaattccagcacactggcggccgttactagt

SEQ ID NO: 7 - DNA, 401 bp, Homo sapiens
tggtgttgttggcgccagttccctggacctggaacagccgtgtggagggcccggtctccaagttgttagttcgggaggtgcctccctggtagaccaccatgcgtcccttgaagatggacataagatgaggtggctccttgcccattgggacccggatctggactggttcaccattgtacttctggtccaggatgacggcttgataagctgatgctgtaatttcatcttggctggcctggctgccctgccaaacgtagagcaggtaatgctgcttctcgccgatgaaggtaggtgtaagagcagcaggtaagcaagttcgcccccatagaagtgggcctagccacttggaattccagcacactggcggcccgttactagtgggatcccgagctcggtaccaa

SEQ ID NO: 8 - DNA, 1151 bp, Homo sapiens
ctctctccataaaactcagcactttacagatgtagaatatataagcatgccaaatttacttatctgccacatacaaagcatcattccaggtgctagtgaggggaaaaaaaagttggagatttggtccctcgaggagctccagatattaatctacctaactaagtccccaggtttcttccaggcatggaagaattagtggtgctacatggatgaggactagtcattgggcaatatttcctgtacaaagaatccctagacgccatactgagttttaagttccttaattcctaatttaaggcttctagtgaagcctcctcacagtaggcttcactaggcccacagtgcccctagacctctgacaatcccaccctagacagactttattgcaaaatgcgcctgaagaggcagatgattcccaagagaactcaccaaatcaagacaaatgtcctagatctctagtgtggtagaactatgcacctaaacattgctgcaaaatgaacacacttttagacacccctgcagatatctaagtaagtggagaagactattttttcaacaaacattttctctttcaccctaactcctaaacagcttactggggcttctgcaagacagaaagatcataattcagaaggtaaccatcgttatagacataaagtttctggtcaaaagggttatagttaatgctctgcactttttcctgcatcttatgcattacaatgtctagtttgccctctttccctgtgtttgtgtcataatagtaaaaaatctcttctgttctggtgtttcatagtacgggtggcatacagaaccccacataccatgaaggcgttagaagcagatggtttatactgcttggtataccaagtgtttagcacctgaagtgtggtgtcattgagtttactaatcaccatgttaccagtgctggcttcagttgaataaataacccacaatccattctcatccacagcaaagtcaatatcttgccaagcaacattagcatatgaaaagcggttattataggcagcattagggagagtttgagtcacagcaatcgtgttggtggtcaggttaactctggcaatattcccggtgttgtacatgttgacgtacatgttgttgttgtaaactgctgtaccactaccttggac

SEQ ID NO: 9 - DNA, 604 bp, Homo sapiens
  misc_feature 410, 427: n = A,T,C or G
ctgtgcaagggctttacaaaaactgtgccaggacttcccatgaggctggattgcttgattcatgttttatgagccccacaatactgaagctccttttccagggacttggcataggcagtcaattccacatttgggataggtcctctctggaagtgaatgtcaggcagtgacatccaagtttctgcatgcagtgggttaacagccatgtttagggggaacatgatttaaaaagtacatctctctccctcctcccccacatgcacaaggctcacatctcattatggtgkcggcccatgtcacattaaagtgtgatacttkggttttgaaaacattcaaacagtctctgtggaaatctggagagaaattggcggagagctgccgtggtgcattcctcctgtagtgcttcaagntaatgcttcatcctttnttaataacttttgatagacaggggctagtcgcacagacctctgggaagccctggaaaacgctgatgcttgtttgaagatctcaagcgcagagtctgcaagttcatcccctctttcctgaggtctgttggctggaggctgcagaacattggtgatgacatggaccacgccatttgtgg

SEQ ID NO: 10 - DNA, 473 bp, Homo sapiens
tcgagaagatccctagtgagactttgaaccgtatcctgggcgacccagaagccctgagagacctgctgaacaaccacatcttgaagtcagctatgtgtgctgaagccatcgttgcggggctgtctgtggagaccctggagggcacgacactggaggtgggctgcagcggggacatgctcactatcaacgggaaggcgatcatctccaataaagacatcctagccaccaacggggtgatccactacattgatgagctactcatcccagactcagccaagacactatttgaattggctgcagagtctgatgtgtccacagccattgaccttttcagacaagccggcctcggcaatcatctctctggaagtgagcggttgaccctcctgggctcccctgaattctgtattcaaagatggaacccctccaattgatgcccatacaaggaatttgcttcggaaccacataattaaaga

SEQ ID NO: 11 - DNA, 411 bp, Homo sapiens
  misc_feature 251, 276, 406, 409: n = A,T,C or G
tcctcattggtcggggccaaaagcgtgtactggccgttaccttcaagcatcgtgttgagccctgatgcagccacagcagcccgaagggtctcaaaggtgtcctcgatctcaatgatctgctggatgttgttggtgatggtggagatgaccttatcgatgaggtgcaccaccccgttggttgcatggtggtcggctttyarcarccgggcacagttcacagttacaatcccattaggatagtggtggatctnggatgttggaattctggtacatagnaggtgaggggtcatgcccgtgtttcagctcatcagtcaggactcgcctgcccaccatatggtaagcsgragggcatttgagcagctcaatgtttgacattgctggaccaggggagttccagcacttctanganga

SEQ ID NO: 12 - DNA, 560 bp, Homo sapiens
tacttgcctggagatwgcyttykckwtmtgytcwrawgtccgtggatacagaaatctctgcaggcaagttgctccagagcatattgcaggacaagcctgtaacgaatagttaaattcacggcatctggattcctaatccttttccgaaatggcaggtgtgagtgcctgtataaaatattctatgtttaccttcaacttcttgttctggctatgtggtatcttgatcctagcattagcaatatgggtacgagtaagcaatgactctcaagcaatttttggttctgaagatgtaggctctagctcctacgttgctgtggacatattgattgctgtaggtgccatcatcatgattctgggcttcctgggatgctgcggtgctataaaagaaagtcgctgcatgcttctgttgtttttcataggcttgcttctgatcctgctcctgcaggtgggcgacaggtatcctaggagctgttttcaaatctaagtctgatcgcattgtgaatgaaactctctatgaaaacacaaagcttttgagcgccacaggggaaagtgaaaaacaa

SEQ ID NO: 13 - DNA, 150 bp, Homo sapiens
gggcaggctgtctttttaaaatgtctcggctagctagaccacagatatcttctagacatattgaacacatttaagatttgagggatataagggaaaatgatatgaatgtgtatttttactcaaaataaaagtaactgtttacgttggtga

SEQ ID NO: 14 - DNA, 403 bp, Homo sapiens
ctgctgcctgtggcgtgtgtgggctggatcccttgaaggctgagtttttgagggcagaaagctagctatgggtagccaggtgttacaaaggtgctgctccttctccaacccctacttggtttccctcaccccaagcctcatgttcataccagccagtgggttcagcagaacgcatgacaccttatcacctccctccttgggtgagctctgaacaccagctttggcccctccacagtaaggctgctacatcaggggcaaccctggctctatcattttccttttttgccaaaaggaccagtagcataggtgagccctgagcactaaaaggaggggtccctgaagctttcccactatagtgtggagttctgtccctgaggtgggtacagcagccttggttcctctg

SEQ ID NO: 15 - DNA, 688 bp, Homo sapiens
  misc_feature 638, 639, 649, 660, 666, 669, 671, 673, 674, 679, 684: n = A,T,C or G
caaagcacattttaatcatttattttaaaagggggagtaaagcatttaaactgccaatcctatagactaggacttgaacatcaaaggaaaaatagacaaagactagatgataaagtcattcaaaagcacagaagcacatcacatacaccagcaaggtttccaactactgcactgattaactagatactctcaatagcttttctatagctcgtcctagaaaaaaaaattaaattttcattttcttacaagttccaggcttaaacaaaggcaaaaattacatgcaacaactgatacactcataagttgcacatatgctccaaggtctttattagataacaataaatgctagcactttgtcactgccatcagattttccttatagtcttagagtcatgtaaataaaagttccataatgaaattaaagaaaattaatttttctaatcttagatcagttccatagaaaactattaatttttttaaagtaggcagtagaagggggttggtggggggtggaattggttagtaagtctggttctaatcttctgagctgcctttggaaggaagttatgaggtagaagattctactgacttttagtaaggtggacaatgagagaaaagaaaaagcaggtgcctcatcnncagatccttntggtatttatntgccangtncnanntaatncatanaaag

SEQ ID NO: 16 - DNA, 408 bp, Homo sapiens
caggtcatcaagatgacttacaggatgtaatagggagagctgtcgagattggtgttaaaaagtttatgattacaggtggaaatctacaagacagtaaagatgcactgcatttggcacaaacaaatggtatgtttttcagtacagttggatgtcgtcctacaagatgtggtgaatttgaaaagaataaccctgatctttacttaaaggagttgctaaatcttgctgaaaacaataaagggaaagttgtggcaataggagaatgcggacttgattttgacccgactgcagttttgtcccaaagatactcaactcaaatattttgaaaaacagtttgaactgtcagaacaaacaaaattaccaatgtttcttcattgtccgaaactcacatgctgaatttttggacataat

SEQ ID NO: 17 - DNA, 407 bp, Homo sapiens
ggtcctggggaggccctaggggagcaccgtgatggagaggacagagcaggggctccagcaccttctttctggactggcgttcacctccctgctcagtgcttgggctccacgggcaggggtcagagcactccctaatttatgtgctatataaatatgtcagatgtacatagagatctattttttctaaaacattcccctycccactcctctcccacagagtgctggactgttccaggccctccagtgggctgatgctgggacccttaggatggggctcccagctcctttctcctgtgaatggaggcagaagacctccaataaagtgccttctgggctttttctaacctttgtcttagctacctgtgtactgaaatttgggcctttggatcgaatatggtcaagaggtt

SEQ ID NO: 18 - DNA, 405 bp, Homo sapiens
tgaagagtcaacttgggcctggaggactgataaagtttgtgattttgagggcctctaaaagtattaaagcagcggcagccgctgcacgcagacatgagggctaggttaaaacagtaagatcaagttgtttggacagaaaggctacagagtgtggtcctggctcttgtgtaagaattacgaccacgctaaccatgcctaggaaggaaaggagttattgttttgtagaaaggtgctggggtttgagagatcagtcggacacgattggcagggagagcacgtgtgtttttatgagaattatgcccgagataggtaacagatgaggaagaaatttgggcttgattgaagtaatgggggctgtctgtgaagctttgcagcagtacagcctaggtaatttgctgagcctaa

SEQ ID NO: 19 - DNA, 401 bp, Homo sapiens
tcctgacattcctgccttcttatattaataagacaaataaaacaaaatagtgttgaagtgttggggcagcgaaaatttttggggggtggtatggagagataatgggcgatgtttctcagggctgcttcaagcgggattaggggcggcgtgggagcctagagtgggagagattaagctgaagggaggtcttgtggtaaggggtgatatcatggggatgttagaagaaacatttgtcgtatagaatgattggtgatggcctggatacggttttggatgatttgagaagctaaatggaagatacaaggtccgaataaaaggaggagaaaaatgggtattaaatgtctaagaattgggaggacctaggacatctgattagagagtgcctaaggagattcagcata

SEQ ID NO: 20 - DNA, 331 bp, Homo sapiens
aggtccagctctgtctcatacttgactctaaagtcatcagcagcaagacgggcattgtcaatctgcagaacgatgcgggcattgtccacagtatttgcgaagatctgagccctcaggtcctcgatgatcttgaagtaatggctccagtctctgacctggggtcccttcttctccaagtgctcccggattttgctctccagcctccggttctcggtctccaggctcctcactctgtccaggtaagaggccaggcggtcgttcaggctttgcatggtctccttctcgttctggatgcctcccattcctgccagacccccggctatcccggtgg

SEQ ID NO: 21 - DNA, 346 bp, Homo sapiens
  misc_feature 257: n = A,T,C or G
ggtccaccacttgtacccgatatggacttccggcttctctgtccaatggagccacactaaagatctcaccagtcacgtggtcaattttaagccaacctcttgtgtctcccctcagtgaatagcttatgtccagaccttctggatccttggcagtcacattgcccactttagtgcctatagctacatcctcactgactttcgcttggaatacgtgttgggaaaattgaggtgcttcattcacatctgtcacaataagncgtgaacttggcaaaagaacttgcattgtacttcacaccaaacactagaggctcaggattttctgctttgaacacaatgttggaaacag

SEQ ID NO: 22 - DNA, 360 bp, Homo sapiens
  misc_feature 317: n = A,T,C or G
gaagactccctctctcggaagccggatcccgagccgggcaggatggatcaccaccagccggggactgggcgctaccaggtgcttcttaatgaagaggataactcagaatcatcggctatagagcagccacctacttcaaacccagcacccgcagattgtgcaggctgcgtcttcagcaccagcacttgaaactgactcttcccctccaccatatagtagtattactggtggaagtacctacaacttcagatacagaagtttacggtgagttttatcccgtgccacctccctatagcgttgctacctctcttcctacnwtacgatgaaagctgagaaggctaaagctgctgcaatggcatg

SEQ ID NO: 23 - DNA, 251 bp, Homo sapiens
ggcggagctccacgacgagctggaaaaggaaccttttgaggatggctttgcaaatggggaagaaagtactccaaccagagatgctgtggtcacgtatactgcagaaagtaaaggagtcgtgaagtttggctggatcaagggtgtattagtacgttgtatgttaaacatttggggtgtgatgcttttcattagattgtcatggattgtgggtcaagctggaataggtctatcagtccttgtaataatgatgg

SEQ ID NO: 24 - DNA, 421 bp, Homo sapiens
  misc_feature 182: n = A,T,C or G
caggtctttcccaggtgttgactccagctccagcttcagctccagctccaggtcgggctccagctccagccgcagcttargcagcgggaggttctgtgtcccagttgttttccaatttcaccggctcccgtggatgamcgygggacctgycaswgctcctgtktycctgcyagsacaccacnytttyccgtggacacrarkggaacckcttggaattcacagctyatgttctttctcaraagtttgagaaagaactttctaaagtgagggaatatgtccaattaattagtgtgtatgaaaagaaactgttaaacctaactgtccgaattgacatcatggaraaaggataccatttcttacactgaactggacttcgagctgatcaaggtagaagtgaaggagatggaaaaactggtcatac

SEQ ID NO: 25 - DNA, 381 bp, Homo sapiens
  misc_feature 81, 146, 291, 355: n = A,T,C or G
gaactttttgtttctttattttcaatatttgtcttattaatatttttcttattttataatgcaattacaacaatttagganacaaaacaatataaacaaaagaatgttaaatagttttttttaaaaaatagcttgttgcttgcaanaaagtccatataatcttattcccccccaaatataattttatactttgcactaaaccaaaatagcttatggaaaattagtattaaatagctaaacacagaaaacctacagctataaataacataaaatacagtttaactttaatgngatgcttaaacaaagcaaactatgatgcaatatgaatcaacttcattaattggacaagtccagnggaggcacaaattagataagcactaa

SEQ ID NO: 26 - DNA, 401 bp, Homo sapiens
  misc_feature 219, 236, 276, 300, 303, 310, 325, 330, 335, 359, 374, 380,390: n = A,T,C or G
ggaaaagggactggcctctctgaagagtgagatgagggaagtggaaggagagctggaaaggaaggagctggagtttgacacgaatatggatgcagtacagatggtgattacagaagcccagaaggttgataccagaagccaagaacgctggggttacaatccaagacacactcaacacattagacgggctcctgcattctgatggaccaaccttttcangtggtaagattgaaganggggcctgggcttacctgggaagcaaaaacttttcccganccaaggaacccaggattcaaccangcnacttgcnggccaaggaaggcanaactnggaanaaaaggccccttaagcaaaagggncaccttcatttgctnggaaancagcctttanttggaatcttg

SEQ ID NO: 27 - DNA, 383 bp, Homo sapiens
  misc_feature 32, 38, 49, 100, 142, 147, 181, 250, 258, 272, 274, 297,340, 341, 366, 368, 377: n = A,T,C or G
aattgcaactggacttttattgggcagttacnacaacnaatgttttcanaaaaatatttggaaaaaatataccacttcatagctaagtcttacagagaanaggatttgctaataaaacttaagttttgaaaattaagatgcnggtanagcttctgaactaatgcccacagctccaaggaanacatgtcctatttagttattcaaataccagttgagggcattgtgattaagcaaacaatatatttgttanaactttgnttttaaattactgntncttgacattacttataaaggagnctctaactttcgatttctaaaactatgtaatacaaaagtatanntttccccattttgataaaagggccnangatactgantaggaa

SEQ ID NO: 28 - DNA, 401 bp, Homo sapiens
  misc_feature 212: n = A,T,C or G
ggtcgcgtttcccctggctcacagtctgccattatttgcatttttaaatgaagaaaagtttaacgtggatggatggacagtttacaatccagtggaagaatacaggaggcagggcttgcccaatcaccattggagaataacttttattaataagtgctatgagctctgcgacacttaccctgctcttttggtggttccgtatcgtgcctcanatgatgacctccggagagttgcaacttttaggtcccgaaatcgaattccagtgctgtcatggattcatccagaaaataagacggtcattgtgcgttgcagtcagcctcttgtcggtatgagtgggaaacgaaataaagatgatgagaaatatctcgatgttatcagggagactaataaacaaatttcta

SEQ ID NO: 29 - DNA, 401 bp, Homo sapiens
atatgagtttgccatctccatggatgccatttcaatgccttcagggtaatcattctctccccaaagactgcccacggggtcatcactcctgtgacgaaatgagggctggattgaagatgttctgctgagcacccccctggtcatctttggggtctcagaagagccataatcatgaccattctcagcatctgaataatcaggttctctccaagtgcttggcaagttctgattgtcctcagcactgggatagtctggctccccaaaaaagggtggagagttaggttgaatgtcagcgcctggataatcaggctttcccagagagtctgcgtatggattgattctaaaacttgtatgttccagattctttctggatcctggatggttcaaattggctctgggtc

SEQ ID NO: 30 - DNA, 401 bp, Homo sapiens
cctgaactatttattaaaaacatgaccactcttggctattgaagatgctgcctgtatttgagagactgccatacataatatatgacttcctagggatctgaaatccataaactaagagaaactgtgtatagcttacctgaacaggaatccttactgatatttatagaacagttgatttcccccatccccagtttatggatatgctgctttaaacttggaagggggagacaggaagttttaattgttctgactaaacttaggagttgagctaggagtgcgttcatggtttcttcactaacagaggaattatgctttgcactacgtccctccaagtgaagacagactgttttagacagactttttaaaatggtgccctaccattgacacatgcagaaattggt

SEQ ID NO: 31 - DNA, 297 bp, Homo sapiens
acctccattaatgccaggtgttcctcctctgatgccaggaatgccaccagttatgccaggcatgccacctggattgcatcatcagagaaaatacacccagtcattttgcggtgaaaacataatgatgccaatgggtggaatgatgccacctggaccaggaataccacctctgatgcctggaatgccaccaggtatgcccccacctgttccacgtcctggaattcctccaatgactcaagcacaggctgtttcagcgccaggtattcttaatagaccacctgcaccaacagcaactgt

SEQ ID NO: 32 - DNA, 401 bp, Homo sapiens
caaacctggagccaaaaaggacacaaaggactctcgacccaaactgccccagaccctctccagaggttggggtgaccaactcatctggactcagacatatgaagaagctctatataaatccaagacaagcaacaaacccttgatgattattcatcacttgggtgagtgcccacacagtcaagctttaaagaaagtgtttgctgaaaataaagaaatccagaaattggcagagcagtttgtcctcctcaatctggtttatgaaacaactgacaaacacctttctcctgatggccagtatgtccccaggattatgtttgttgacccatctctgacagttagagcccgatatcactggaagatattcaaaccgtctctatgcttacgaacctgcagatacagct

SEQ ID NO: 33 - DNA, 401 bp, Homo sapiens
agcagagggacaggaatcattcggccactgttcagacgggagccacacccttctccaatccaagcctggccccagaagatcacaaagagccaaagaaactggcaggtgtccacgcgctccaggccagtgagttggttgtcacttactttttctgtggggaagaaattccataccggaggatgctgaaggctcagagcttgaccctgggccactttaaagagcagctcagcaaaaagggaaattataggtattacttcaaaaaagcaagcgatgagtttgcctgtggagcggtgtttgaggagatctgggaggatgagacggtgctcccgatgtatgaaggccggattctgggcaaagtggagcggatcgattgagccctggggtctggctttggtgaactg

SEQ ID NO: 34 - DNA, 401 bp, Homo sapiens
aacaatggctatgaaggcattgtcgttgcaatcgaccccaatgtgccagaagatgaaacactcattcaacaaataaaggacatggtgacccaggcatctctgtatctgtttgaagctacaggaaagcgattttatttcaaaaatgttgccattttgattcctgaaacatggaagacaaaggctgactatgtgagaccaaaacttgagacctacaaaaatgctgatgttctggttgcttgagtctactcctccaggtaatgatgaaccctacactgagcagatggggcaactgtggagagaaggggtgaaaggatcccacctcactcctgatttcattgcaggaaaaaagttagcttgaatatggaccacaaggtaagggcatttgtccatgaatggggctc

SEQ ID NO: 35 - DNA, 401 bp, Homo sapiens
  misc_feature 184, 208, 251, 263, 284, 293, 296, 337, 395: n = A,T,C or G
catttcttcctactagactgcccccttgatccactggcagaaatgatggcaccaccttgtcttcaggtggtgctccttcattattccaaggatgcagcatctctatggtgccaggtatgggggtaaagcctttggcgccctttccgcaatggcacatcagcagtaaaagtggtaccaatagcangaacagaaagggcaaaatcatgancgcaattgctgcgggtcccaagcccacataggaatcatgctgngcttccctgcanccgctgccatgcaagacactnacaaactgngantgtaaggacctgcttttcaggacaactaaaaccctgattgnctgaaatcaggaactgaatttcacttctcccaagctttttctcactttggtgcaacancacact

SEQ ID NO: 36 - DNA, 401 bp, Homo sapiens
cctgctagaatcactgccgctgtgctttcgtggaaatgacagttccttgttttttttgtttctgtttttgttttacattagtcattggaccacagccattcaggaactaccccctgccccacaaagaaatgaacagttgtagggagacccagcagcacctttcctccacacaccttcattttgaagttcgggtttttgtgttaagttaatctgtacattctgtttgccattgttacttgtactatacatctgtatatagtgtacggcaaaagagtattaatccactatctctagtgcttgactttaaatcagtacagtacctgtacctgcacggtcacccgctccgtgtgtcgccctatattgagggctcaagctttcccttgttttttgaaaggggttta

SEQ ID NO: 37 - DNA, 401 bp, Homo sapiens
  misc_feature 2, 3, 6, 9, 16, 18, 19, 23, 30, 33, 48, 56, 59, 62, 73, 75,81, 85, 88, 89, 114, 116, 121, 137, 149, 158, 161, 168,183, 192, 232, 251, 308, 345, 348, 354, 363, 369, 391, 397,400, 401: n = A,T,C or G
cnnctntgnaatggantnnttgnctaaaanganttgatgatgatgaanatccctangangantaagcatggancntgatcntttnctnngcactcctttacgacacggaaacangnatcancatgatggtaccaganaccttatcaccnacgcgcacnganctgactnattccaaagagttgnggttacggncatccggtcattgctcgtgcccattgctgcagggctgatnctactggtgcttattatgntggccctgaggatgctccacaatgaatataagcatgctgcatgatcagcggcaacanatgctctgccgtttgcactacatctttcacggacacnatntcgaanacgggcacnttgcanagttagacttggaatgcatggngccggncann

SEQ ID NO: 38 - DNA, 401 bp, Homo sapiens
aattggctcactctctcaaggcaagcactgtctcaaggcagtctcaaggcagagatgacacagcaaaaaacagagggggagaaaaaagtctattattggcttgtgatttacaaaagccaaagtcctttagataaaaggccaggagtcgtaccaacatagataccaaatccaggagaacacagaccagcgataagagggacgcttccccatgacccagaccagcctaaagcccctgtgggggcagccagtggggagctgtcagaccttggacatggtggtctttgagaatgggtctgcccttctctccctgaccagttgggatagacacctgactggaatccttgacactggcaggtgtttctatgaacagagaggactgtgcctgtcttcctgaatcccaa

SEQ ID NO: 39 - DNA, 401 bp, Homo sapiens
  misc_feature 8, 209: n = A,T,C or G
tctggtanggagcaattctattatttggcattgcatggctgggttgaattaaaacagggagtgagaacaggtgagtctagaagtccaactctgaaaaggaccactgtacatttgaacacacggctgtgttaaagatgctgctaatgtcagtcactgggtgcactaaaggatctcttattttatgtaaaacgttgggaatgacaagatanaactgatactctggtaagttaccctctgaagctacttcttgtgaaatactaatgacagcatcatcctgccaagcgaaagaggcaggcataagcaaggacaaattaaaagggggtaagagccttatcatgatgaggagtcttgttttgacatcttgggaaaagctgtccatagtgtgaagtcgtcaatttctc

SEQ ID NO: 40 - DNA, 401 bp, Homo sapiens
tctggtcacccaactcttgtggaagaggggaattgagatcgagtactgaatatctggcagagaggctggaatccttcagccccagagcccagggaccactccagtagatgcagagaggggcctgcccaggggtcagggcagtgggtatcactggtgacatcaagaatatcagggctggggaggcatctttgtttcctggtgccctcctcaaagttgctgacactttggggacgggaaggggtagaagtagggctgctccttttggagctggagggaatagacctggagacagagttgaggcagtcgggctgtccaggttctaagcatcacagcttctgcactgggctctgaggagattctcagccagaggatcccagcctcctcctccctcaaatgtcaag

SEQ ID NO: 41 - DNA, 401 bp, Homo sapiens
  misc_feature 170, 317, 334, 364: n = A,T,C or G
ctggactaaaaatgtccactatggggtgcactctacagtttttgaaatgctaggaggcagaaggggcagagagtaaaaaacatgacctggtagaaggaagagaggcaaaggaaactaggtggggaggatcaattagagaggaggcacctgggatccaccttcttccttangtcccctcctccatcagcaaaggagcacttctctaatcatgccctcccgaagactggctgggagaaggtttaaaaacaaaaaatccaggagtaagagccttaggtcagtttgaaattggagacaaactgtctggcaaagggtgcganagggagcttgtgctcangagtccagcccgtccagcctcggggtgtangtttctgaagtgtgccattggggcctcaccttctctg

SEQ ID NO: 42 - DNA, 310 bp, Homo sapiens
ggttcgacaaatccccaaaaatggcaaattaagccctgtgacaaaataagttattggatcatacagaaatagcccaaatctggaaattttgaattaaaattgtaatcctgtaaaacaagttttggggtgaatggatttctttaataccaataatatttttaattcccaccacagatggatttgctgaatatgctaatgctgtgaatgagaaaacaattttggggtaggtatacccacaagtaatctgatgacaaaataaaccacagactgatgtcaaatggacaaaaaactgaaaatatgctgtgagaaa

SEQ ID NO: 43 - DNA, 401 bp, Homo sapiens
aggtcacttacacttgtgaccagtgtggggcagagacctaccagccgatccagtctcccactttcatgcctctgatcatgtgcccaagccaggagtgccaaaccaaccgctcaggagggcggctgtatctgcagacacggggctccagattcatcaaattccaggagatgaagatgcaagaacatagtgatcaggtgcctgtgggaaatatccctcgtagtatcacggtgctggtagaaggagagaacacaaggattgcccagcctggagaccacgtcagcgtcactggtattttcttgccaatcctgcgcactgggttccgacaggtggtacagggtttactctcagaaacctacctggaagcccatcggattgtgaagatgaacaagagtgaggatgat

SEQ ID NO: 44 - DNA, 401 bp, Homo sapiens
atccctgtaagtctattaaatgtaaataatacatactttacaacttctcttagtcggcccttggcagattaaatctttgcaaaattccatatgtgctattgaaaaatgaaataaaacctcagatgtctgaattcttatttcaaatacagttatataattattttaaattacaatatacaatttctgttaaatacaactgttaagggattctgagaacaattataagattataataatatatacaaactaacttctgaaatgacatgggttgtttccttcccaccctcctaccctctcaaagagtttttgcatttgctgttcctggttgcaaaaggcaaaagaaaatctaaaaatagtctgtgtgtgtccacgacatgctcgctcctttgagaatctcaaac

SEQ ID NO: 45 - DNA, 401 bp, Homo sapiens
  misc_feature 212, 224: n = A,T,C or G
gtgcctgctgcctggcagcctggccctgccgctgcctcaggaggcgggaggcatgagtgagctacagtgggaacaggctcaggactatctcaagagattttatctctatgactcagaaacaaaaaatgccaacagtttagaagccaaactcaaggagatgcaaaaaattctttggcctacctatactggaatggtaaactcccgcgtcatanaaataatgcaanaagcccagatgtggagtgccagatgttgcagaatactcactatttccaaatagcccaaaatggacttccaaagtggtcacctacaggatcgtatcatatactcgagacttaccgcatattacagtggatcgattagtgtcaaaggctttaaacatgtggggcaaagagatccccctg

SEQ ID NO: 46 - DNA, 401 bp, Homo sapiens
  misc_feature 70, 182: n = A,T,C or G
gtcagaattgtctttctgaaaggaagcactcggaatccttccgaactttccaagtccatccatgattcanagatactgccttctctctctctgggattttatgtgtttctgatagtgaattgttgatgtatttgctactttgcttcttttctctttcaagacttgatcattttatatgctgnttggagaaaaaaagaacttttggtagcaaggaggtttcaagaaatgattttggattttctgctgcggaatttctcggcacctacctgtagtatggggcacttggtttggttgcagagtaagaaggtggaagaatgagctgtacttggttaagcagttgaaaccttttttgagcaggatctgtaaaagcataattgaatttgtttcacccccgtggattc

SEQ ID NO: 47 - DNA, 401 bp, Homo sapiens
ggtctgcagcaatgcacttcaaccatacatactgcttccactagctaataccaaatgcaggttctcagatccagacaaatggaggaaaagaacatttatgcttccgtttcagaaagccaagtcgtagttttggcccttcctttctctaaagtttattcccaaaaacaggtagcattcctgattgggcagagaagaggatattttcagcccacatctgctgcaggtatgtcattttctcccatcttcactgtgactagtaaagatctcaccacttctctttggaatttccaactttgcttgtgattgaatgtcacttcgtgaatttgtattatgtcagatcacttggcattgctcttccatatgcatcaagttgccaggcactaaacccaatgttcatgaac

SEQ ID NO: 48 - DNA, 430 bp, Homo sapiens
acataacttgtaaactttttctgcttgggggctgtaacagacagaagagtaaagactacaaggattttctgaagatgcttcaatgaaaatcatcatttcctctttagtcatcccaagtcttggtttgaaaaacttgggcatggacttatacagaccttgaaccaccactgacttatcattgggtggcagaccttgaaaccaagctctctgtgttacttctgaaagtgcatcaattctgatttggctaagaacagaagacaaatactgggatcgtgattctgtgttatactctagccacagcatagcagcttctcgaacggtttcttccttttctacatttaaattgtcactactgagaatatctatcagtaggtcatgtgacagacctgccccggggccggcccgctcgatgcttgccgaatatcatggt

SEQ ID NO: 49 - DNA, 57 bp, Homo sapiens
  misc_feature 17, 44, 49: n = A,T,C or G
ggtattaacaatatcangcactcattcttcccctcttatgaaanggatnaattttta

SEQ ID NO: 50 - DNA, 327 bp, Homo sapiens
  misc_feature 6, 10, 20, 22, 25, 28, 30, 37, 40, 41, 42, 51, 58, 59, 68,69, 70, 75, 76, 79, 91, 95, 108, 109, 111, 142, 146, 180,200, 201, 213, 218, 233, 235, 247, 265, 290, 299, 306: n = A,T,C or G
gatggnggtntccacaagantnaangtncntattaantannncttgtaganccacttnnattaattgnnntatgnntgnccttctggtggntgtngaagcttcatatnntntttggacatcattacacgtcttagctctttnaagnacaactttaatgctatatgaattttgccattttngctaacactggtatgctccnngcatccaccatnccacntggaattatttattncnttcatattaatnttttgtttaccaaatctnacttgacccgaacgaaactttctgngtattttanggccccnccattcttacttttcaagcct

SEQ ID NO: 51 - DNA, 236 bp, Homo sapiens
cgtctcgaagaagcgctgcaggccgatgatggactgcacgtctgccttgtcctcagttaacttgttgaattgcttgaacatgcggcccacatcctgggcaaactcctgtggggagctgtagggaggtgacaacttctcctggaggcgggcacggatcagggtcagatccagggtgccaccgggctggtccagggagaaggtggagtcgtagccagacctgcccgggcggccgctcg

SEQ ID NO: 52 - DNA, 291 bp, Homo sapiens
  misc_feature 168, 197, 202, 209, 218, 257, 271, 287: n = A,T,C or G
ctcacatcctgggtccggctgtagagctgcaccatggtgctgagcgccccctccagctccttgtagatgtaaaggacggcgaaggagctgtagtctgtgtccacgatgcgcacgtccaggtagcccaaggccgggactctgaagttgtccctcggagcccaccttcangtactcgggcatccacctggttacagccnttcgncctcggnaactccatntggactttacaggccgccctcctctgtgggcctgatggnccttgcaggacatnggaacacgggagctcncttt

SEQ ID NO: 53 - DNA, 95 bp, Homo sapiens
  misc_feature 37, 60, 73, 76, 92: n = A,T,C or G
gtctgtgcagtttctgacacttgttgttgaacatggntaaatacaatgggtatcgctgancactaagttgtanaanttaacaaatgtgctgnttg

SEQ ID NO: 54 - DNA, 66 bp, Homo sapiens
  misc_feature 4, 8, 11, 13, 26, 27, 35, 38, 43, 47, 57: n = A,T,C or G
cctnaatnatntnaatggtatcaatnnccctgaangangggancggnggaagccggntttgtccgg

SEQ ID NO: 55 - DNA, 265 bp, Homo sapiens
  misc_feature 25, 223, 241, 254, 259: n = A,T,C or G
atctttcttctcagtgccttggccntgttgagtctatctggtaacactggagctgactccctgggaagagaggccaaatgttacaatgaacttaatggatgcaccaagatatatgaccctgtctgtgggactgatggaaatacttatcccaatgaatgccgtgttatgtttttgaaaatcggaaacgccagacttctatcctcattcaaaaatctgggccttnctgaaaaccagggttttnaaaatcccattcnggtcnccggcg

SEQ ID NO: 56 - DNA, 420 bp, Homo sapiens
  misc_feature 85, 164, 198, 228, 257, 261, 283, 298, 326, 385, 390: n = A,T,C or G
gagcggccgcccgggcaggtcctcgcggtgacctgatgggatttcaaaaccttggttctcagcaaggcccagatttttgaatgangatagaagtctggcgtttccgattttcaaaacataacacgcattcattgggataagtatttccatcagtcccacagacngggtcatatatcttgggtgcatccattaagttcntttgttaacatttgggcctctctttcccangggaattcagctcccagttgtttaccaanattnaactccaccggggccaaaggcncttgaaaaaaaaaanaattccttgtttaccttccttgggcttnaagttctggcgtccaaaagttcaatttgaaaactgcaccgcacttaccacgtctcttcnagaancctggggacacctcggccgcgaccacgcta

SEQ ID NO: 57 - DNA, 170 bp, Homo sapiens
gaagcggagttgcagcgcctggtggccgccgagcagcagaaggcgcagtttactgcacaggtgcatcacttcatggagttatgttgggataaatgtgtggagaagccagggaatcgcctagactctcgcactgaaaattgtctctccagacctcggccgcgaccacgcta

SEQ ID NO: 58 - DNA, 193 bp, Homo sapiens
attttcagtgcgagagtctaggcgattccctggcttctccacacatttatcccaacataactccatgaagtgatgcacctgtgcagtaaactgcgccttctgctgctcggcggccaccaggcgctgcaactccgcttcatcggcttcgcccagctccgccattgttcgccacctgcccgggcggccgctcgaa

SEQ ID NO: 59 - DNA, 229 bp, Homo sapiens
cgcaactctcgagcatttatatacaatagcaaatcatccagtgtgttgtacagtctataatactccaacagtctcccatctgtattcaatggcgccacccaatacagtcctttgtttggatgctggggagagtaatccctaccccaagcaccatatagataagaaaaccctctccagttgagctgaaccacagacggtttgctgatacctgcccgggcggccgctcgaa

SEQ ID NO: 60 - DNA, 340 bp, Homo sapiens
tcgagcggccgcccgggcaggtcctctaaagatcaaaacacccctgtcgtccaccctcctcccactccagggaagctgtggtcatggtggtgtggtgaacatcagcaaaccgtctgtggttcagctcaactggagagggttttcttatctatatggtgcttggggtagggattactctccccagcatccaaacaaaggactgtattgggtggcgccattgaatacagatgggaaactgttggagtattataaactggtacaacacactggatgatttgctattgtatataaatgctcgagaattgcggatcacctatggacctcggccgcgaccacgctg

SEQ ID NO: 61 - DNA, 179 bp, Homo sapiens
  misc_feature 16, 76, 96, 110, 112, 122, 138, 140, 143, 155, 161, 163,175, 178: n = A,T,C or G
tttttgtgacggacgnttggagtacatgtcccaggatcacatccagcagctagagtggctgggacaagctggcggnggccaagcactgttgaaacnataggggtctgggngnactcgggttnaagtggttggtccgantnttnataaccttgtcngaaccnancatctcggttgncang

SEQ ID NO: 62 - DNA, 78 bp, Homo sapiens
  misc_feature 51, 72: n = A,T,C or G
agggcgttcgtaacgggaatgccgaagcgtgggaaaaagggagcggtggcnggaagacggggatgagcttangacaga

SEQ ID NO: 63 - DNA, 410 bp, Homo sapiens
  misc_feature 48, 95, 182, 290, 314, 350, 365, 380: n = A,T,C or G
cccagttacttggggaggctgaggcagggagaatcctttgaacccggngggtgggaggttgcagtgagcccgagatagcaccattgcacttccancatggggtggacagagtgagactctatctcaaaaaaaaagaaaagaaaaggaaagagattagattaagattaagtacctacttcctntcccatttcaagtcctgaaaatagaggatcagaaatgttgaggaattctttaggatagaaagggagatgggattttacttatggggaaagaccgcaaataaagactgnaacttaaccacattccccaagtgnaaggtgttacccaagaagtaggaacccttttggctnttaccttaccttccngaaaaaaacttattncttaaaatggaaacccttaaagcccgggca

SEQ ID NO: 64 - DNA, 199 bp, Homo sapiens
  misc_feature 153, 156, 158, 162, 170, 171, 184, 192: n = A,T,C or G
cttgttctcaaaaaggtcaaagggagcccgacgaggaataaatagcaatgccctgaattccaactgaccttctacagaaaagtgcttgactgccaagtggtcttcccagtcattagtgaggctcttgtagaattctccatactcctcttgggngangncatnagggtttnnggcccaaataggntgggcctngttaagt

SEQ ID NO: 65 - DNA, 125 bp, Homo sapiens
  misc_feature 115, 118, 120: n = A,T,C or G
agcggtacagttctgtcctggcatcatcattcattgtagtatggtcaataggtgccatgaaactcagtagcttgctaaggacatgaaaccgaagtttcctgcctttgctggcctngtngngggta

SEQ ID NO: 66 - DNA, 204 bp, Homo sapiens
attcagaattctggcatcggtatttctataaagtccatcagttagagcaggagcaggcccggagggacgccctgaagcagcgggcggaacagagcatctctgaagagcccggctgggaggaggaggaagaggagctcatgggcatttcacccatatctccaaaagaggcaaaggttcctgtggacctcggccgcgaccacgcta

SEQ ID NO: 67 - DNA, 383 bp, Homo sapiens
  misc_feature 32, 46, 59, 132, 190, 234, 264, 272: n = A,T,C or G
tcagggcctccaggcagccagttttgcagganattcagcacctagngtcttcctgcctnacgctcccaagaacctgctcctgcagggggaacatcagaactcgtccttgatgtcaaaatggggctggtcttnaggcttgaagtccaggttagggctgccatcctcattgagaattctccgggcagtgtanccgacgatggggtatttggctttgtacactttggtgaaaacctnatccagggcctccagttccttggccgtganacccgtantgtcatgggtgaggtctgcaggatccaaggacatcttggctacccctctagtggagtccttccccgtcaaggcattgtaaggggctcctcgtccataaaactccttttcgg

SEQ ID NO: 68 - DNA, 99 bp, Homo sapiens
tcacatctccttttttttttaactttttcaaatttttgtgttaaatagaaggctaaagggttagatttaagtttctgctacattgaccctatttaccta

SEQ ID NO: 69 - DNA, 37 bp, Homo sapiens
  misc_feature 10, 16, 21, 24, 27, 29: n = A,T,C or G
gagaaggacntacggncctgntantanangaatctcc

SEQ ID NO: 70 - DNA, 222 bp, Homo sapiens
  misc_feature 196: n = A,T,C or G
gtgggtcatttttgctgtcaccagcaacgttgccacgacgaacatccttgacagacacattcttgacattgaagcccacattgtccccaggaagagcttcactcaaagcttcatggcgcatttcgacagattttacttccgttgtaacgttgactggagcaaaggtgaccaccataccgggtttgagaacacccantcacctgccccgggcggccgctcgaa

SEQ ID NO: 71 - DNA, 428 bp, Homo sapiens
  misc_feature 281, 308, 364, 376, 383, 397, 413, 420: n = A,T,C or G
caggagtattttgtagaaaagccagaagagcattagtagatgtatggaaatatacggtagggcacacgctgacagtacttttcccaagccacgccgtatttcttcttacagtggtactcgtcacgagcttctcggtggacaagcaacatggtgaaataaattatgtagaaataaggcagaatgtggttaaaaccacatgggagggaccacgccaaggccatgatgagatcacccaagtaattggggtggcgaacaaagccccaccatccagaaactagaanaatttttcccgttgaaatatgaatggnttttaaatgtgcaagctttggatcactgggaattttcccgaatgcctttttctganaattgcaccttnggaagantccttaccccaagnttcagaccattatttnaaaagcnttggaact

SEQ ID NO: 72 - DNA, 264 bp, Homo sapiens
  misc_feature 218, 236, 247, 256: n = A,T,C or G
gaataaagagcttactggaatccagcagggttttctgcccaaggatttgcaagctgaagctctctgcaaacttgataggagagtaaaaagccacaatagagcagtttatgaagatcttggaggagattgacacacttgatcctgccagaaaatttcaaagacagtagattgaaaaggaaaggctttggtaaaaaaaggttcaggcattcctagccgantgtgacacagtggagcanaacatctgcangagactgancggctgca

SEQ ID NO: 73 - DNA, 442 bp, Homo sapiens
  misc_feature 249, 283, 313, 385, 390, 407: n = A,T,C or G
ggcgaatccggcgggtatcagagccatcagaaccgccaccatgacggtgggcaagagcagcaagatgctgcagcatattgattacaggatgaggtgcatcctgcaggacggccggatcttcattggcaccttcaaggcttttgacaagcacatgaatttgatcctctgtgactgtgatgagttcagaaagatcaagccaaagaacttcaaacaagcagaaagggaagagaagcgagtcctcggtctggngctgctgccaagggagaatctggtctcaatgacngtagaaggaccttcttccaaagatactggnattgctcgagttccacttgctggaacttcccggggcccaaggatcgcaaggcttctggcaaaagaaatccanacttnggccgggaccacctaanccaattcacacactggcggccgtactagtggatcc

SEQ ID NO: 74 - DNA, 337 bp, Homo sapiens
  misc_feature 167, 268: n = A,T,C or G
ggtagcagcgtctccagagcctgatctggggtcccagatacccaggcagcagcagccctggaggtaaagggcaagctccccaatgtgaggggagaccccattcctggtcagccaggctttcagaggagatagcaggtcgagggagccaacgaagaagagactgccancaggggaaggactgtcccgccaaggacagaactgattcaggggggtcaatgctcctctagagaagagccacacagaactggggggtccaggaaccatgaancttggctgtggtctaaggagccaggaatctggacagtgttctgggtcataccaggattctggaattgta

SEQ ID NO: 75 - DNA, 588 bp, Homo sapiens
  misc_feature 444, 495, 531, 562: n = A,T,C or G
catgatgagttctgagctacggaggaaccctcatttcctcaaaagtaatttatttttacagcttctggtttcacatgaaattgtttgcgctactgagactgttactacaaactttttaagacatgaaaaggcgtaatgaaaaccatcccgtccccattcctcctcctctctgagggactggagggaagccgtgcttctgaggaacaactctaattagtacacttgtgtttgtagatttacactttgtattatgtattaacatggcgtgtttatttttgtatttttctctggttgggagtatgatatgaaggatcaagatcctcaactcacacatgtagacaaacattagctctttactctttctcaaccccttttatgattttaataattctcacttaactaattttgtaagcctgagatcaataagaaatgttcaggagagangaaagaaaaaaaatatatgttccccatttatatttagagagagacccttantcttgcctgcaaaaagtccacctttcatagtagtangggccacatattacattcagttgctataggncagcactgaactgcattacctgggca

SEQ ID NO: 76 - DNA, 196 bp, Homo sapiens
gcggtatcacagcctggcccccatgtactatcggggggcccaggctgccatcgtggtctatgacatcaccaacacagatacatttgcacgggccaagaactgggtgaaggagctacagaggcaggccagccccaacatcgtcattgcactcgcgggtaacaaggcagacctggacctgcccgggcggccgctcgaa

SEQ ID NO: 77 - DNA, 458 bp, Homo sapiens
  misc_feature 196, 335, 409, 410, 417, 442, 447, 450: n = A,T,C or G
agtagagatggggtttcactgtgttaaccaggatggtcttgatctcctggcctcgtgatctgcccgcctcggcctcccaaagtgttgggattacaggcgtgaaccaccgcacccggccagaaatgttagtttttccctattctctctcctttttcctattatatacttggtcaaccagacagccatcctaccccanaatggtaatgcctcttcattcctcatatgagggaataaaagagaaaaaagcttttggaaaacatccacttatctaatcatcccaaatatgtaatcaaaagtatacaactcatgtgaagaatacactggtaaaatgttantataggccaaggtatcttgaattcctatatagaaagctggtaaatgcccttttggctggaaccgccatcttccnntaattcncccaaaatgaccaaacacaaagggnaaganganaagccccc

SEQ ID NO: 78 - DNA, 464 bp, Homo sapiens
  misc_feature 376, 397, 442, 454: n = A,T,C or G
tccgcaaatttcctgccggcaaggtcccagcatttgagggtgatgatggattctgtgtgtttgagagcaacgccattgcctactatgtgagcaatgaggagctgcggggaagtactccagaggcagcagcccaggtggtgcagtgggtgagctttgctgattccgatatagtgcccccagccagtacctgggtgttccccaccttgggcatcatgcaccacaacaaacaggccactgagaatgcaaaggaggaagtgaggcgaattctggggctgctggatgcttacttgaagacgaggacttttctggtgggcgaacgagtgacattggctgacatcacagttgtctgcaccctgttgtggctctataagcaggntctagaaccttcttttcgcangaccttcggccggaccacgcttaacccaaattccacacacttgcnggccgtactaanggaatcccac

SEQ ID NO: 79 - DNA, 380 bp, Homo sapiens
  misc_feature 164, 188, 350: n = A,T,C or G
ctgtatgaccagtttttccatctccttcacttctaccttgatcagctcgaagtccagttcagtgtaagaaatggtatccttctccatgatgtcaattcggacagttaggtttaacagtttcttttcatacacactaattaattggacatattccctcactttanaaagttctttctcaaacttctganaaaagaacatgaactgtgaattccaagcgttcccactctgtccacgggaaaaggtggtgtctggcagggaaacagaacactggcaggtccacggtcatccacggagccggtgaaattgggaaaacaactgggacacagaacctccgctgcctaagctgcggntgggagcttggaacccgacctggaactgga

SEQ ID NO: 80 - DNA, 360 bp, Homo sapiens
  misc_feature 42, 130, 131, 134, 200, 210, 226, 243, 257, 273, 278, 295,303, 316, 337, 344, 357, 360: n = A,T,C or G
tcgagcggccgcccgggcaggtcctcagagagctgtttgttncgcttcttcaaaaactcctattctccacttctgctaaaggactggatgacatcaattgtgatagcaatatttgtgggtgttctgtcanncancatcgcactcctgaacaaagtagatgttggattggatcagtctctttccacccagatgactcctanatggtggatnatttcaaatccatcantcagtacctgcatgcgnggtccgcctgtgtnctttgtcctgcaggangggcnctactacacttcttccnaggggcanaacatggtgtgcngcggccatgggctggcaacantgattcnctgctgcacccanatn

SEQ ID NO: 81 - DNA, 440 bp, Homo sapiens
  misc_feature 121, 132, 191, 211, 224, 312, 342, 354, 360, 407, 412, 427: n = A,T,C or G
acgtggtccggcgagtctgacctgcagatatgaactccttgggaaacctacattctgcctcagacatactgggggcaaatggctttaaaagtctggctcagggagccaagattacagaaanccgttgagtcnccatacatggacactgacaaaggaactgaagatatccaaacaagccctcctggtcccgngcctgcataaagatcgggancggaacggtaccngacgtctgtggtcaggggttgtggaaaattggaaaaaaccagtcctgcccacattgacagggaagcctcaacggaaattgaacagatngtcttatcaccagtctcccctcctggatcntgtctcggctcnggggantcagtgatcagtcctttcaggtggaagaagcaaagaagatcaacaanaagcngatcctctcacctgntaccagcatatgg

SEQ ID NO: 82 - DNA, 264 bp, Homo sapiens
  misc_feature 18, 54, 130, 137, 162, 175, 184, 190, 192, 202, 206, 213,218, 241, 260: n = A,T,C or G
agcgtggtcgcggccgangtcctgacattcctgccttcttatattaattatacnaataaaacaaaatagtgttgaagtgttggagcggcgaaaatttttggggggtggtatggacagagaatgggcgatnttctcanggctgcttcaagtgggattggggcngcgtgggatcatncagtggganagattncnctgaccggantctnttggtanggatnatcttgtggggatgtgcaagagncattcgtctcctgaatgantggt

SEQ ID NO: 83 - DNA, 410 bp, Homo sapiens
  misc_feature 2, 18, 169, 209, 245, 263, 265, 284, 378: n = A,T,C or G
ancgtggtcgcggccgangtccacagttgtgggagagccagccattgtgggggcagctccacaggtaagactcgtgtcctgagcagcgcacatcatccaggacaatgggtcctgagccctgaccaaaccgggcatttcctggggctgacatggcccagccacagcccanttgcctgcagacgaaattggcatcattggtgtcccagtantcatcacacacggtgccccaggaacctccggtatangaactccactcggcctcnanacctgtcgcctccattccncagcctcagggggcaaactgggattcagatccttctgtgggtacaggtggtgatatcctgacaggccaactttctggcctgagtgttgactgangctgggcagacctgcccgggcggccgctcgaa

SEQ ID NO: 84 - DNA, 320 bp, Homo sapiens
  misc_feature 61, 81, 82, 90, 98, 111, 153, 182, 184, 187, 189, 198, 210,211, 212, 238, 262, 277, 279, 289, 295, 299, 318, 320: n = A,T,C or G
tcgaacggccgcccgggcaggtctgccccaggtgtatccatttgccgccgatctctatcanaaggagctggctaccctgcnncgacgaantcctgaanataatctcacccncccagatctctctgtcgcaatggagatgtcgtcatcggtggncctgatcacagggcattggactcagaganangtnancacagtgtngaagcgattgannnagttcagttgctggtcttacccgatnttggaaggaaggaaaacgtgttangacgtatctcgatgnanttgaccaaanctgaangctncagggggcatcgcaaaganan

SEQ ID NO: 85 - DNA, 218 bp, Homo sapiens
  misc_feature 117, 120, 152, 155, 193, 194: n = A,T,C or G
tcgagcggccgcccgggcaggtctgctgcccgtgctggtgccattgccccatgtgaagtcactgtgccagcccagaacactggtctcgggcccgagaagactcctttctccaggctntangtatcaccactaaaatctccaggggcaccatnganatcctgggtgtccgcaatgttgccaatgtctgtccgcnnattggctacccaactgttgcatca

SEQ ID NO: 86 - DNA, 283 bp, Homo sapiens
  misc_feature 25, 183, 193, 204, 225, 240: n = A,T,C or G
tcgacttcttgtgaaggttttgganaaatatgtatcagttcgttttatttgggtattcaataatatccttggtgataatgctgactccatggcttctgaccccaaaaattgaccctgctgccactggttgtagccctgagattgatttttgtagccacgattgtttcctcgtcctctgaagtnctggttgtanttccctctgtngggcattcccctctgttgtanttccctctgtttgantaactaccacggccaggaaaaacaggggcacgaaggtatggat

SEQ ID NO: 87 - DNA, 179 bp, Homo sapiens
  misc_feature 66, 81, 89, 113, 120, 135, 148, 161: n = A,T,C or G
agcgtggtcccggccgatgtctttctgtgtaagtgcataacactccacatacttgacatccttcangtcacgggccagctnttcagcantctctggagtgataggctactgtntgttctnggcaagtgtctcaanaatacaggggtcntctctgagatgantttcagtcccgaaccctc

SEQ ID NO: 88 - DNA, 512 bp, Homo sapiens
  misc_feature 27, 30, 75, 106, 198, 216, 294, 349: n = A,T,C or G
tcgagcggccgcccgggcaggtcctancanagaatcaccaaatttatggagagttaacaggggtttaacaggaangaagtgcctttagtaagttctcaagccagangctggaggcagcagctaaatcagaggacaggatcctcagtgaaagtgagccattcggggtggcatgtcactccaggaataagcacaacttanaaacaaatgatttcgtangatagcacagtgacattggtgcacttgtgaacctgaggccactgtgtcaaactgtgcactggttgtgaatagggaganccaaaaattatgtcctactgggtaatgagctttcaatgggctcgatcctctcacnctgaaagctctgtagagcagctcagaaccacaaccactcccaacattgacccttctgggggtactgtctgtggcacccacaggaaggagctggagatccccattaggactgtccacccacacttgaagccacaaaactgcacctcggccgcgaccaccgctta

SEQ ID NO: 89 - DNA, 358 bp, Homo sapiens
  misc_feature 65, 207, 214, 221, 257, 258, 266, 271, 287, 297, 307, 308,325: n = A,T,C or G
tcgagcgggccgcccgggcaggtctgccagtccccatcccagacattctttgcatctaagctgangtctgaactgagtggggtgggctggtgtttccatcctcacaactccagtgagccgggtgtggccgtggcctgcgtctctctggcggttagtgatgttggcatcatccacctttttcaaaacaaaagcactggactgaagaanaatcccnccctgtntccacccagtccatggtttttaataaaagggttatnnaagttgancaagncatcaccacacacaancctaagaacntttttcatcnntccccaaaacaaacccncaccctgggaactccgggcgcgaaccacgccta

SEQ ID NO: 90 - DNA, 250 bp, Homo sapiens
  misc_feature 125, 163, 172, 199, 244: n = A,T,C or G
cgagcggccgcccgggcaggtctggatggggagacggactggaactgcggcttcccgtggcctgcacgcacaaggctccccacggccgccgaccttcttcagattcgatcgtatgtgtacgcacnaagagccaaatattgacattcacaacttcgtgggaatnttaccccanaagactgcgaccccccgatcaggcganagcctgagcatagaagaacaccgctgtgggcttggcactgtgggncccatc

SEQ ID NO: 91 - DNA, 133 bp, Homo sapiens
  misc_feature 12, 56, 58, 61, 78, 82, 107, 116, 123, 126: n = A,T,C or G
tcgagcggccgnccgggcaggtcccgggtggttgtttgccgaaatgggcaagttcntnaancctgggaaggtggtgcntgtnctggctggacgctactccggacgcnaagctgtcntcgtgangancattgat

SEQ ID NO: 92 - DNA, 232 bp, Homo sapiens
  misc_feature 18, 168, 173, 179, 219: n = A,T,C or G
agcgtggtcgcggccgangtctgtcactttgcgggggtagcggtcaattccagccaccagagcatggctgtaggggcgatctgaggtgccatcatcaatgttcttcacgatgacaagctttgcgtccggagtagcgtccagccaggacaagcaccaccttcccacgtnttcangaactngcccatttcggcataaccacccgggacctgcccgggcggncgctcgaaaagcc

SEQ ID NO: 93 - DNA, 480 bp, Homo sapiens
  misc_feature 19, 27, 221, 406, 439: n = A,T,C or G
agcgtgggtcgcggccgangtctgtangctcaccggccagagaagaccactgtgagcattttgccgtatatcctgccctgccatttgttcactttttaaactaaaataggaacatccgacacacaccgtttgcatcgtcttctcccttgatattttaagcattttcccatgtcgtgagtttctcagaaacatgtttttaacaattgtactatttagtcatngtccatttactataatttatctgaccatttccctactgttaaaatacttaagacggtttctgatttttccactatttaaataatgctgtgatgaatatctttaaaatcttctgatttcttacttttttcccccttagatgcctggaagtggtattttgaggtgaaagagtttgttcattttgaanatatttctgtctctctctcgacctgatgtgtanacgctcacttccagttagcagaaccaccttagtttgtgtct

SEQ ID NO: 94 - DNA, 472 bp, Homo sapiens
  misc_feature 9, 33, 70, 105, 129, 135, 136, 154, 180, 190, 213, 232, 235,286, 292, 293, 305, 335, 341, 363, 372, 400, 418, 422, 425,472: n = A,T,C or G
tcgagcggncgcccgggcagggtctgatgtcantcacaacttgaagggatgccaatgatgtaccaatccnatgtgaaatctctcctcttatctcctatgctgganaagggattacaaagttatgtggcngataannaattccatgcacctctantcatcgatgagaatggagttcatganctggtgaacnatggtatctgaacccgataccangttttgtttgccacgatangantagcttttatttttgatagaccaactgtgaacctaccacacgtcttggacnactganntctaactatccncagggttttattttgcttgttgaactcttncagctnttgcaaacttcccaagatccanatgactgantttcagatagcatttttatgattcccanctcattgaaggtcttatntatntcnttttttccaagccaaggagaccattggacctcggccgcgaccacctn

SEQ ID NO: 95 - DNA, 309 bp, Homo sapiens
  misc_feature 97, 117, 139, 173, 184, 193, 206, 230, 236, 239, 242, 265,280, 299: n = A,T,C or G
tcgagcggccgcccgggcagagtgtcgagccagcgtcgccgcgatggtgttgttggagagcgagcagttcctgacggaactgaccagacttttccanaagtgccggacgtcgggcancgtctatatcaccttgaagaantatgacggtcgaaccaaacccattccaaagaaangtactgtgganggctttgancccgcagacaacnagtgtctgttaagaactaccgatnggaaanaanaanatcagcactgtgggtgagctccnagggaagttaataantttcggatgggcttattcnaacctcctta

SEQ ID NO: 96 - DNA, 371 bp, Homo sapiens
  misc_feature 327: n = A,T,C or G
tcgagcggccgcccgggcaggtccaccactcacctactccccgtctctatagatttgcctgttctgggcagttctcagcaatggaatcctactgtgtatctttttgtgactggttctttaactcagcatcacattttcaaggttcatccatgctgcagcctggctccgtactggtgacagtacttcatttctctctcccttttgttcagaccaaggtctccctctgtccccaaggctaaagtgcagttggtgtgatcatggctcactgcagcctcaaactcctggactcaaacagtcctcccatctcagcctcccaaagtgctgatnttataagttgcaagccctgcacccagcctgtatctccagtttgt

SEQ ID NO: 97 - DNA, 430 bp, Homo sapiens
  misc_feature 5, 25, 30, 34, 41, 42, 43, 44, 46, 60, 97, 116, 141, 145,158, 183, 184, 226, 232, 243, 245, 257, 271, 288, 298, 300,303, 308, 318, 325, 329, 354, 390, 428: n = A,T,C or G
tcgancggccgcccgggcaggtttnttttntttnttttttnnnngntagtatttaaaganatttattaaatcatcttatcaccaaaatggaaacatnttccaactagaaacatgcnaccatcatcttccccagtccagtcncaangtccaatattttncttgcctctgcagataaaaagttcnnatttttatacccactcttactcccccccaaaattttaattcngtcctnccctaaaattncnccgggtaacaanttaccaaaatggcnaaccaattattttaaanaaaagttgcncnttnaaaanggaaactttntggcaanttancctcttttcccttcccaccccccantttaaggggaaaacaatggcactttgctcttgcttnaacccaaaattgtcttccaaaaactattaaaaatgttnaa

SEQ ID NO: 98 - DNA, 307 bp, Homo sapiens
  misc_feature 3, 15, 19, 20, 25, 28, 43, 70, 75, 81, 102, 139, 162, 203,259, 260, 283, 295: n = A,T,C or G
tcnaacggccgcccnggcnngtctngcngcacctgtgcctcanccgtcgatacctggtcgattgggacanggaanacaatntggttttcagggaggccacanatttggagaaacggatgaattctcctttattccgaantcagctccttggtctccgtaganggtgatcttgaaattctcctgttttgaaaactttcttgaanaaaccttacctgctggttgtatttggtctcccactcggacaagtactcgttatccnnggtactcttaatgtgcccacgtnaactccccgggntggcaactggaa

SEQ ID NO: 99 - DNA, 207 bp, Homo sapiens
  misc_feature 5, 19, 24, 25, 38, 46, 59, 61, 66, 69, 81, 83, 88, 96, 98,104, 106, 115, 126, 132, 135, 146, 152, 160, 165, 172, 173,187, 188, 189, 192, 202, 203: n = A,T,C or G
gtccnggaccgatgttgcnaaganntttcttggtccantaggttcnaaaaaatgataancnaggtntancacgtgaagatntntatanagtcttantnaaaacncntagatctgnatgacgataantcgaanacngggggaggggntgaggngaggtggngtganggaaganntgttgataaaagannnagntgataagaanngagc

SEQ ID NO: 100 - DNA, 200 bp, Homo sapiens
  misc_feature 3, 5, 6, 14, 21, 23, 29, 46, 71, 150, 151, 166, 176, 185,186, 195: n = A,T,C or G
acntnnactagaantaacagncnttctangaacactaccatctgtnttcacatgaaatgccacacacatanaaactccaacatcaatttcattgcacagactgactgtaattaattttgtcacaggaatctatggactgaatctaatgcnnccccaaatgttgttngtttgcaatntcaaacatnnttattccancagat

SEQ ID NO: 101 - DNA, 51 bp, Homo sapiens
  misc_feature 35: n = A,T,C or G
tcgagcggccgcccgggcaggtctgaccagtgganaaatgcccagttattg

SEQ ID NO: 102 - DNA, 385 bp, Homo sapiens
  misc_feature 50, 145, 202, 214, 306, 362: n = A,T,C or G
aacgtggtcgcggccgaagtccatggtgctgggattaatccactgtgacngtgactctgagttgagttgtttttcaatcttctccaagcctgtggactcatcctccacatccttgggtagtaggatgaacatgctgaagatgctnattttgaaaaggaactctatgaatcttacaattgaatactgtcaatgtttccccatnacagaacgtggncccccaaggttccatcatctgcactgggtttgggtgttctgtcttggttgactcttgaaaagggacatttctttttgttttcttgaattcanggaaattttcttcatccactttgcccacaaaagttaggcagcatttaacccccaanggattttgggtctgggtccttcc

SEQ ID NO: 103 - DNA, 189 bp, Homo sapiens
  misc_feature 72, 138, 156: n = A,T,C or G
agcgtggtcgcggccgaagtctgcagcctgggactgaccgggaagctctgattatttacccaccacaggtangttgtgttctgaatctcaagttcacaggttaaggctacagcatcctcatcctccacggggttgganttgttgctggtgatgaanggtttggggtggctctgcataactgttgatctc

SEQ ID NO: 104 - DNA, 181 bp, Homo sapiens
  misc_feature 38, 82, 83, 97: n = A,T,C or G
tcgagcggccgcccgggcaggtccaggtctccaccaangcaccaccgtgggaagctggtaattgatgcccaccttgaagccnntggggcaccatccnccaactggatgctgcgcttggttttgatggtggcaatggcacattgactcttttgggaaccacttcaccacggtacaacaggca

SEQ ID NO: 105 - DNA, 327 bp, Homo sapiens
  misc_feature 80, 116, 167, 175, 182, 194, 210, 277: n = A,T,C or G
tcgagcggccgcccgggcaggtcttctgtggagtctgcgtgggcatcgtgggcagtggggctgccctggccgatgctcanaaccccagcctctttgtaaagattctcatcgtgganatctttggcagcgccattggcctctttggggtcatcgtcgcaattcttcanacctccanaatgaanatgggtgactanataatatgtgtgggtngggccgtgcctcacttttatttattgctggttttcctgggacagaactcgggcgcgaacacgcttanccgaattccaacacactggcgggcgttactagtggatccgagctcggtac

SEQ ID NO: 106 - DNA, 268 bp, Homo sapiens
  misc_feature 18, 73, 96, 117, 129, 161, 195, 219, 247, 250, 255, 257: n = A,T,C or G
agcgtggtcgcggccgangtctggcgtgtgccacatcggtcccacctcgctttacaaaacagtcctgaacttnatctaataaaattattgtacacnacatttacattagaaaaaganagctgggtgtangaaaccgggcctggtgttccctttaagcgaangtggctccacagttggggcatcgtcgcttcctcnaagcaaaaacgccaatgaaccccnaagggggaaaaaggaatgaaggaactgnccngggangnccgctccgaaa

SEQ ID NO: 107 - DNA, 353 bp, Homo sapiens
  misc_feature 70, 167, 179, 184, 185, 196, 198, 215, 216, 221, 235, 286,288, 299, 312, 321, 335, 344: n = A,T,C or G
tcgagcggccgcccgggcaggtggccaggccatgttatgggatctcaacgaaggcaaacacctttacacnctagatggtggggacatcatcaacgccctgtgcttcagccctaaccgctactggctgtgtgctgccgcaggccccagcatcaagatctgggatttanagggaaagatcnttgtnnatgaactgaancntaaattatcagttccannaccangcaaaaaccacccngtgcactccctggcctggtctgctgatgggacctcgggcgcgaacacgctnancccaattccancacactgggcggncgttactantggatccgaactcnggtaccaancttggcgtt

SEQ ID NO: 108 - DNA, 360 bp, Homo sapiens
  misc_feature 61, 121, 145, 194, 202, 217, 237, 252, 254, 275, 279, 318,330, 343, 346, 352: n = A,T,C or G
agcgtggtcgcggccgaagtcctggcctcacatgaccctgctccagcaacttgaacagganaagcagcagctacatccttaaggtccggaaagttagatgaagatttggatcctgcattgncctgcctcccacctatctctcccnaattataaacagcctccttgggaagcagcagaatttaaaaactctcccnctgccctnttgaactacacaccnaccgggaaaacctttttcanaatggcacaaaaatncnagggaatgcatttccatgaangaanaaactgggttacccaaaattattgggttggggaaatccngggggggttttnaaaaaagggcaanccnccaaanaaaaaaac

SEQ ID NO: 109 - DNA, 101 bp, Homo sapiens
  misc_feature 10, 47, 77, 82: n = A,T,C or G
atcgtggtcncggccgaagtcctgtgtcctggatgggccgtgtgcancgaatccgttggcgactcctaactaccaanaaaangactctcggaagaaatttc

SEQ ID NO: 110 - DNA, 300 bp, Homo sapiens
  misc_feature 4, 56, 116, 130, 236, 243, 246, 248, 271, 276, 280: n = A,T,C or G
ccanggaaacccagagtcacatgagatagggtggctttcgggacagggggtcagangaatggtacatggatctcagcccctgatggacacggaacaggtgtggtcagaactcccangattctgcatccangatccagtctctatagaagttatggatcattccttcatttcattccccccttcatgaaaaaacttctgaacaagccttttttctcactttggggccctgtttggcncaaggtnttnanttggggaaaaaaaaacaaatccnttccnttanccctccgtggggaatgacct

SEQ ID NO: 111 - DNA, 366 bp, Homo sapiens
  misc_feature 42, 65, 90, 180, 250, 257, 264, 296, 333, 337: n = A,T,C or G
cgagcggccgcccgggcaggtccttgtgttgccatctgttancattgatttctggaatggaacanctttctcaaagtttggtcttgctantcatgaagtcatgtcagtgtcttaagtcactgctgctcacttccttacccagggaatatactgcataagtttctgaacacctgttttcantattcactgttcctctcctgcccaaaattggaagggacctcatttaaaaatcaaatttgaatcctgaaanaaaaacnggaaatntttctcttggaatttggaatagaattattcanttgaataacatgttttttccccttgccttgctcttcncaanaacatctggacctcggccgcgacacctta

SEQ ID NO: 112 - DNA, 405 bp, Homo sapiens
  misc_feature 7, 23, 29, 52, 119, 136, 139, 147, 172, 204, 232, 247, 320,323, 324, 362, 386: n = A,T,C or G
ctgactnctaaacttctaattcnatcaanataactactctccttccgtcttncagagtgttcacaataaatctgtgaatctggcatacacagttgctggaaaattgttcttcctccacnaaaaggtcaattgttcnccncatgaaanaagataaattgttcatccatcactnctgaaccatccaaaacgccggcggaattattnccccgttattatggggaacggaattttnaataaatttgggaangaatggggcttttattgttttgttttccccctttcttggcattgattgggccgcaatgggccccctcgctcanaanntgccccggggccggccgctccaaaaccgaaattcccanccacacttggcgggccgttactanttggatccgaactcggtta

SEQ ID NO: 113 - DNA, 401 bp, Homo sapiens
ggatagaagagtatatgggtttggcaccacggggtggataggcaaaacatttggttgataaggcgcagattctgaactaacttgtaaggcttgtctggttttaggacaggtaaaatgggggaatggtaaggagagtttataggttttaggagcccatgctgtagcaggcaagtgataacaggctttaatcctttcaaagcatgctgtgggatgagatattggcatttgagcggggtaagggtgattaggttttaatgagatggtaaggggtgcatgatccggtccgccaaggaagggaagtagaggtatcttatacttgtggggttaaggtgggggggatataagagggaggacgccaaaggaggctttggattaggaataaggggcggcaatgagatgca

SEQ ID NO: 114 - DNA, 401 bp, Homo sapiens
  misc_feature 2, 13, 17, 37, 277, 303, 318, 324, 381: n = A,T,C or G
angtccacaggangcangaggccaggctccgtcccanccagtccatgatgttgaagaggaggaagcagcacatggggttgaagaactgactccacttcccaggactggtggagctggtcaccatggctgtggtggcggggaagacggacagggtgacttctggaagacagtgaagactgaaggttttcctggcttctggggctcatctggctctgattccggctccttctccaggtcaagatccagggttcagagctactttcttgggggactactngggaatcccgttctcatctgggggtngaggggggacggggnaagggncatgcttgtgacccaggtttcccacctcggcccgcgaccacgctaaggcccgaattncagcacacttggcggcccgt

SEQ ID NO: 115 - DNA, 401 bp, Homo sapiens; identical to SEQ ID NO: 44

SEQ ID NO: 116 - DNA, 301 bp, Homo sapiens
  misc_feature 1, 12, 13, 33, 34, 88, 89, 90, 104, 106, 116, 121, 131, 142,147, 150, 160, 164, 166, 175, 197, 251, 285, 298: n = A,T,C or G
ngatttaattgnnagcttctttttaatggaatnnttggctaaaatgaattgatgattatgaatatccctaggaggagttagcatggannntgatcattttcttngnactcctttangacanggaaacaggnatcagcatganggtancanaaaccttatnaccnangcgcacganctgacttcttccaaagagttgnggttccgggcagcggtcattgccgtgcccattgctggagggctgattctagtgntgcttattatgctggccctgaggatgcttccaanatgaaaataagangct

SEQ ID NO: 117 - DNA, 383 bp, Homo sapiens; identical to SEQ ID NO: 27
  misc_feature 32, 38, 49, 100, 142, 147, 181, 250, 258, 272, 274, 297,340, 341, 366, 368, 377: n = A,T,C or G

SEQ ID NO: 118 - DNA, 301 bp, Homo sapiens
ctgctagaatcactgccgctgtgctttcgtggaaatgacagttccttgttttttttgtttctgtttttgttttacattagtcattggaccacagccattcaggaactaccccctgccccacaaagaaatgaacagttgtagggagacccagcagcacctttcctccacacaccttcattttgaagttcgggtttttgtgttaagttaatctgtacattctgtttgccattgttacttgtactatacatctgtatatagtgtacggcaaaagagtattaatccactatctctagtgcttgac

SEQ ID NO: 119 - DNA, 401 bp, Homo sapiens
taaggacatggacccccggctgattgcatggaaaggaggggcagtgttggcttgtttggatacaacacaggaactgtggatttatcagcgagagtggcagcgctttggtgtccgcatgttacgagagcgggctgcgtttgtgtggtgaatggggaggaaatgtcactgccgaagaccaaaaacaagcttcttggtataaaagactcttacagaatatgtgtattgtaatttattgatctggatgcttaagtgtcatggacagtaaatgaatttgaactttatgtttgaggacatgacattgggtttgaaaatataaactgcttttgagcagtttaagtcagggcatttgagaataaaataggaactttctcttcagtttgtaaaactctcttgccctctct

SEQ ID NO: 120 - DNA, 301 bp, Homo sapiens
tccagagataccacagtcaaacctggagccaaaaaggacacaaaggactctcgacccaaactgccccagaccctctccagaggttggggtgaccaactcatctggactcagacatatgaagaagctctatataaatccaagacaagcaacaaacccttgatgattattcatcacttgggtgagtgcccacacagtcaagctttaaagaaagtgtttgctgaaaataaagaaatccagaaattggcagagcagtttgtcctcctcaatctggtttatgaaacaactgacaaacacctttctc

SEQ ID NO: 121 - DNA, 2691 bp, Homo sapiens
gcttgcccgtcggtcgctagctcgctcggtgcgcgtcgtcccgctccatggcgctcttcgtgcggctgctggctctcgccctggctctggccctgggccccgccgcgaccctggcgggtcccgccaagtcgccctaccagctggtgctgcagcacagcaggctccggggccgccagcacggccccaacgtgtgtgctgtgcagaaggttattggcactaataggaagtacttcaccaactgcaagcagtggtaccaaaggaaaatctgtggcaaatcaacagtcatcagctacgagtgctgtcctggatatgaaaaggtccctggggagaagggctgtccagcagccctaccactctcaaacctttacgagaccctgggagtcgttggatccaccaccactcagctgtacacggaccgcacggagaagctgaggcctgagatggaggggcccggcagcttcaccatcttcgcccctagcaacgaggcctgggcctccttgccagctgaagtgctggactccctggtcagcaatgtcaacattgagctgctcaatgccctccgctaccatatggtgggcaggcgagtcctgactgatgagctgaaacacggcatgaccctcacctctatgtaccagaattccaacatccagatccaccactatcctaatgggattgtaactgtgaactgtgcccggctcctgaaagccgaccaccatgcaaccaacggggtggtgcacctcatcgataaggtcatctccaccatcaccaacaacatccagcagatcattgagatcgaggacacctttgagacccttcgggctgctgtggctgcatcagggctcaacacgatgcttgaaggtaacggccagtacacgcttttggccccgaccaatgaggccttcgagaagatccctagtgagactttgaaccgtatcctgggcgacccagaagccctgagagacctgctgaacaaccacatcttgaagtcagctatgtgtgctgaagccatcgttgcggggctgtctgtagagaccctggagggcacgacactggaggtgggctgcagcggggacatgctcactatcaacgggaaggcgatcatctccaataaagacatcctagccaccaacggggtgatccactacattgatgagctactcatcccagactcagccaagacactatttgaattggctgcagagtctgatgtgtccacagccattgaccttttcagacaagccggcctcggcaatcatctctctggaagtgagcggttgaccctcctggctcccctgaattctgtattcaaagatggaacccctccaattgatgcccatacaaggaatttgcttcggaaccacataattaaagaccagctggcctctaagtatctgtaccatggacagaccctggaaactctgggcggcaaaaaactgagagtttttgtttatcgtaatagcctctgcattgagaacagctgcatcgcggcccacgacaagagggggaggtacgggaccctgttcacgatggaccgggtgctgacccccccaatggggactgtcatggatgtcctgaagggagacaatcgctttagcatgctggtagctgccatccagtctgcaggactgacggagaccctcaaccgggaaggagtctacacagtctttgctcccacaaatgaagccttccgagccctgccaccaagagaacggagcagactcttgggagatgccaaggaacttgccaacatcctgaaataccacattggtgatgaaatcctggttagcggaggcatcggggccctggtgcggctaaagtctctccaaggtgacaagctggaagtcagcttgaaaaacaatgtggtgagtgtcaacaaggagcctgttgccgagcctgacatcatggccacaaatggcgtggtccatgtcatcaccaatgttctgcagcctccagccaacagacctcaggaaagaggggatgaacttgcagactctgcgcttgagatcttcaaacaagcatcagcgttttccagggcttcccagaggtctgtgcgactagcccctgtctatcaaaagttattagagaggatgaagcattagcttgaagcactacaggaggaatgcaccacggcagctctccgccaatttctctcagatttccacagagactgtttgaatgttttcaaaaccaagtatcacactttaatgtacatgggccgcaccataatgagatgtgagccttgtgcatgtgggggaggagggagagagatgtactttttaaatcatgttccccctaaacatggctgttaacccactgcatgcagaaacttggatgtcactgcctgacattcacttccagagaggacctatcccaaatgtggaattgactgcctatgccaagtccctggaaaaggagcttcagtattgtggggctcataaaacatgaatcaagcaatccagcctcatgggaagtcctggcacagtttttgtaaagcccttgcacagctggagaaatggcatcattataagctatgagttgaaatgttctgtcaaatgtgtctcacatctacacgtggcttggaggcttttatggggccctgtccaggtagaaaagaaatggtatgtagagcttagatttccctattgtgacagagccatggtgtgtttgtaataataaaaccaaagaaacata

SEQ ID NO: 122 - protein, 683 aa, Homo sapiens
MALFVRLLALALALALGPAATLAGPAKSPYQLVLQHSRLRGRQHGPNVCAVQKVIGTNRKYFTNCKQWYQRKICGKSTVISYECCPGYEKVPGEKGCPAALPLSNLYETLGVVGSTTTQLYTDRTEKLRPEMEGPGSFTIFAPSNEAWASLPAEVLDSLVSNVNIELLNALRYHMVGRRVLTDELKHGMTLTSMYQNSNIQIHHYPNGIVTVNCARLLKADHHATNGVVHLIDKVISTITNNIQQIIEIEDTFETLRAAVAASGLNTMLEGNGQYTLLAPTNEAFEKIPSETLNRILGDPEALRDLLNNHILKSAMCAEAIVAGLSVETLEGTTLEVGCSGDMLTINGKAIISNKDILATNGVIHYIDELLIPDSAKTLFELAAESDVSTAIDLFRQAGLGNHLSGSERLTLLAPLNSVFKDGTPPIDAHTRNLLRNHIIKDQLASKYLYHGQTLETLGGKKLRVFVYRNSLCIENSCIAAHDKRGRYGTLFTMDRVLTPPMGTVMDVLKGDNRFSMLVAAIQSAGLTETLNREGVYTVFAPTNEAFRALPPRERSRLLGDAKELANILKYHIGDEILVSGGIGALVRLKSLQGDKLEVSLKNNVVSVNKEPVAEPDIMATNGVVHVITNVLQPPANRPQERGDELADSALEIFKQASAFSRASQRSVRLAPVYQKLLERMKH

SEQ ID NO: 123 - DNA, 1205 bp, Homo sapiens
ccagtcagcagagggacaggaatcattcggccactgttcagacgggagccacacccttctccaatccaagcctggccccagaagatcacaaagagccaaagaaactggcaggtgtccacgcgctccaggccagtgagttggttgtcacttactttttctgtggggaagaaattccataccggaggatgctgaaggctcagagcttgaccctgggccactttaaagagcagctcagcaaaaagggaaattataggtattacttcaaaaaagcaagcgatgagtttgcctgtggagcggtgtttgaggagatctgggaggatgagacggtgctcccgatgtatgaaggccggattctgggcaaagtggagcggatcgattgagccctgcggtctggctttggtgaactgttggagcccgaagctcttgtgaactgtcttggctgtgagcaactgcgacaaaacattttgaaggaaaattaaaccaatgaagaagacaaagtctaaggaagaatcggccagtgggccttcgggagggcggggggaggttgattttcatgattcatgagctgggtactgactgagataagaaaagcctgaactatttattaaaaacatgaccactcttggctattgaagatgctgcctgtatttgagagactgccatacataatatatgacttcctagggatctgaaatccataaactaagagaaactgtgtatagcttacctgaacaggaatccttactgatatttatagaacagttgatttcccccatccccagtttatggatatgctgctttaaacttggaagggggagacaggaagttttaattgttctgactaaacttaggagttgagctaggagtgcgttcatggtttcttcactaacagaggaattatgctttgcactacgtccctccaagtgaagacagactgttttagacagactttttaaaatggtgccctaccattgacacatgcagaaattggtgcgttttgtttttttttcctatgctgctctgttttgtcttaaaggtcttgaggattgaccatgttgcgtcatcatcaacattttgggggttgtgttggatgggatgatctgttgcagagggagaggcagggaaccctgctccttcgggccccaggttgatcctgtgactgaggctccccctcatgtagcctccccaggcccagggccctgagg

SEQ ID NO: 124 - DNA, 583 bp, Homo sapiens
ccaagaagcagtggccttattgcatcccaaaccacgcctcttgaccaggctgcctcccttgtggcagcaacggcacagctaattctactcacagtgcttttaagtgaaaatggtcgagaaagaggcaccaggaagccgtcctggcgcctggcagtccgtgggacgggatggttctggctgtttgagattctcaaaggagcgagcatgtcgtggacacacacagactatttttagattttcttttgccttttgcaaccaggaacagcaaatgcaaaaactctttgagagggtaggagggtgggaaggaaacaaccatgtcatttcagaagttagtttgtatatattattataatcttataattgttctcagaatcccttaacagttgtatttaacagaaattgtatattgtaatttaaaataattatataactgtatttgaaataagaattcagacatctgaggttttatttcatttttcaatagcacatatggaattttgcaaagatttaatctgccaagggccgactaagagaagttgtaaagtatgtattatttacatttaatagacttacagggataagg

SEQ ID NO: 125 - DNA, 783 bp, Homo sapiens
tcaaccatacatactgcttccactagctaataccaaatgcaggttctcagatccagacaaatggaggaaaagaacatttatgcttccgtttcagaaagccaagtcgtagttttggcccttcctttctctaaagtttattcccaaaaacaggtagcattcctgattgggcagagaagaggatattttcagcccacatctgctgcaggtatgtcattttctcccatcttcactgtgactagtaaagatctcaccacttctctttggaatttccaactttgcttgtgattgaatgtcacttcgtgaatttgtattatgtcagatcacttggcattgctcttccatatgcatcaagttgccaggcactgttgcgctgtcgggcccactggaatccacgggggtgaaacaaattcaattatgcttttacagatcctgctcaaaaaaggtttcaactgcttaaccaagtacagctcattcttccaccttcttactctgcaaccaaaccaagtgccccatactacaggtaggtgccgagaaattccgcagcagaaaatccaaaatcatttctgaaacctccttgctaacaaaagttctttttttctccaaacagcatataaaatgatcaagtcttgaaagagaaaagaagcaaagtagcaaatacatcaacaattcactatcagaaacacataaaatcccagagagagagaaggcagtatctctgaatcatggatggacttggaaagttcggaaggattccgagtgcttcctttcagaaagacaattctg

SEQ ID NO: 126 - DNA, 604 bp, Homo sapiens
cctgctagaatcactgccgctgtgctttcgtggaaatgacagttccttgttttttttgtttctgtttttgttttacattagtcattggaccacagccattcaggaactaccccctgccccacaaagaaatgaacagttgtagggagacccagcagcacctttcctccacacaccttcattttgaagttcgggtttttgtgttaaagttaatctgtacattctgtttgccattgttacttgtactatacatctgtatatagtgtacggcaaaagagtattaatccactatctctagtgcttgactttaaatcagtacagtacctgtacctgcacggtcacccgctccgtgtgtcgccctatattgagggctcaagctttcccttgttttttgaaaggggtttatgtataaatatattttatgcctttttattacaagtcttgtactcaatgacttttgtcatgacattttgttctacttatactgtaaattatgcattataaagagttcatttaaggaaaattacttggtacaataattattgtaattaavagatgtagcctttattaaaattttatatttttcaaaaaaaaaaaaaaaaaaaaa

SEQ ID NO: 127 - DNA, 417 bp, Homo sapiens
ctgagcctctgtcaccagagaaggctgaggccccaatggcacacctcagaaacctacaccccgaggctggacggctggactcctgagcacaagctccctctcgcaccctttgccagacagtttgtctccaatttcaaactgacctaaggctcttactcctggattttttgtttttaaaccttctcccagccagtcttcgggagggcatgattagagaagtgctcctttgctgatggaggaggggacctaaggaagaaggtggatcccaggtgcctcctctctaattgatcctccccacctagtttcctttgcctctcttccttctaccaggtcatgttttttactctctgccccttctgcctcctagcatttcaaaaactgtagagtgcaccccatagtggacatttttagtccagg

SEQ ID NO: 128 - DNA, 657 bp, Homo sapiens
ccacactgaaatgcagtttaatgtggaaacttttctaaatacatattgtagcatctttggacatcaacgtgtggcctgaaatttttattattgttccctcttctcctccattaaaaaaaaaatctccttgtggtatttagtcatttaccattaacacatattatggcttaaaaagggccatcccttccttttctgagctggagttcttcacgctcacctttgatgcatggccttagctggttactttgccttggtttggtcatgaacattggggttagtggcctggcaacttgaatgcatatggaaagaacaatgccaagtgatctgacataatacaaattccgaagtgacattcaatcacaagcaaagttggaaattccaaagagaagtggtgagatctttactagtcacagtgaagatgggagaaaatgacatacctgcagcagatgtgggctgaaaatatcctcttctctgcccaatcaggaatgctacctgtttttgggaataaactttagagaaaggaagggccaaaactacgacttggctttctgaaacggaagcataaatgttcttttcctccatttgtctggatctgagaacctgcatttggtattagctagtggaagcagtatgtatggttgaagtgcattgctgcag

SEQ ID NO: 129 - DNA, 1220 bp, Homo sapiens
cgcgtgctcggctcacaccaacaaggcaagccaaaggcgcccctccccagagggatccctaacgtgcccagcatgtagattctggactaacagacaacatacattcaccgctggtcacccagatcctcattcaaacccactgctggcacatccctttccttactttgccctgtgctaccagccacggaaggagcctctcttgttttttctataaaatgggtaggcaggagaaaagcaggtgccctaagattgctctaaggcccagcatgtggttacagttctctgacttgcagaacctgccaggtgtatggctacaagttatcctcgtgctgatctgtctcattactaagttaatggagaagacagaaaggtaaaaatcacgtgtagcaagaacaactcttatttcacaaactcaggtatgaaacgaaacgcctgtccttcatggaactgcttttagctcctgtcttttcaaaatggcagagggagttcctacacacactttttccctggaggccaaggtctaggggtagaaaggggaggggtggggctaccaggtagcagttgacaacccaaggtcagaggagtggccctcagtgtcatctgtccacagtgatacctgccaagatgaccactgacccacatctggtcttagtcattggtctcctcagatttctggggccacctgcaagccccattccattcctacagatctctcagccacctgtaagtcctttgtgaagatgtgggtgacacagggggacaggaaaacccatttctcaacccagatccatgtctccactgcttctactctgggttgggattcaggaagacaggcacagtcctctctgttcatagaaacacctgccagtgtcaaggattccagtcaggtgtctatcccaactggtcagggagagaagggcagacccattctcaaagaccaccatgtccaaggtctgacagctccccactggctgcccccacaggggctttaggctggtctgggtcatggggaagcgtccctcttatcgctggtctgtgttctcctggatttggtatctatgttggtacgactcctggccttttatctaaaggactttggcttttgtaaatcacaagccaataatagacttttttctccccctctgttttttgctgtgtcatctctgccttgagactgccttgagacagtgcttgccttgagagagtgagccaattaacag

SEQ ID NO: 130 - DNA, 1274 bp, Homo sapiens
ccatatgagtttgccatctccatggatgccatttcaatgccttcagggtaatcattctctccccaaagactgcccacggggtcatcactcctgtgacgaaatgagggctggattgaagatgttctgctgagcacccccctggtcatctttggggtctcagaagagccataatcatgaccattctcagcatctgaataatcaggttctctccaagtgcttggcaagttctgattgtcctcagcactgggatagtctggctccccaaaaaagggtggagagttaggttgaatgtcagcgcctggataatcaggctttcccagagagtctgcgtatggattgattctaaaacttgtatgttccagattctttctggatcctggatggttcaaattggctctgggtccaggatgatcagagttgctctgagctccagggtagtccggttctaaggagccaaaatgatctggatgtgttctggagcctgcatagtttccactgctgctggagcctgcaaaatcaggatttcgttgagatccagggtagtctggttgtctggatgatgctcggtggtagggatgactctgaaattcactataatctggctctggtagagaggtaggatggtctgggcttgttctagaggctgcagagtatgcattgcttctggtgccagaatagtctggattactcagagatctaggataatttggttctgccagagacccaggatagtctggacgtgttctggaggctacagagtatggattgctcctggtgccggggtaatctggattgttcagaggacctggaacatctggataaccttgagttttcaaatacccctgcgtacggttctgagaccctgaatagtcagggtaatctgggtcttcctcagaccagttattcctgtagtaggcagacatgttggtatggactcttcaccctggagtggtaaactgtcccagcatttgcaattactcagggatcttttttttttcacttttttgcccttattgttcttgctttgtcccaagtagatgcaaatgttgtgcaaaccaacttgatcttaagatgttgttaagaacactggagtcacgtgtccatgggtccttcaggctggcttttgatgggagctgggatgcagatgatttacggagggttataatctgtgatgctggtctgaagtctgaatattccaagttgctgactgcaggcagagcctcatgtcctcctggcgctcctgttgccgctgcttgcgctggccctcgggtcga

SEQ ID NO: 131 - DNA, 554 bp, Homo sapiens
  misc_feature 403: n = A,T,C or G
ctgtaattctgccttttctaccttcattccatccttcctctgcccagataaagkccagcagaaattcctcctttctacctctctgggactctgagacaggaaatcttcaaggaggagtttttccctccccactattcttattctcaacccccagaggaaccaaggctgctgtacccacctcagggacagaactccacactatagtgggaaagcttcagggacccctccttttagtgctcagggctcacctatgctactggtccttttggcaaaaaaggaaaatgatagagccagggttgcccctgatgtagcagccttactgtggaggggccaaagctggtgttcagagctcacccaaggagggaggtgataaggtgtcatgcgttctgctgaacccactggntggtatgaacatgaggcttggggtgagggaaaccaagtaggggttggagaaggagcagcacctttgtmacacctggctacccatagctagctttctgccctcaaaaactcagccttcaagggatccagcccacacacgccacaggcagcag

SEQ ID NO: 132 - DNA, 787 bp, Homo sapiens
ctggtcacccaactcttgtggaagaggggaattgagatcgagtactgaatatctggcagagaggctggaatccttcagccccagagcccagggaccactccagtagatgcagagaggggcctgcccaggggtcagggcagtgggtatcactggtgacatcaagaatatcagggctggggaggcatctttgtttcctggtgccctcctcaaagttgctgacactttggggacgggaaggggtagaagtagggctgctccttttggagctggagggaatagacctggagacagagttgaggcagtcgggctgtccaggttctaagcatcacagcttctgcactgggctctgaggagattctcagccagaggatcccagcctcctcctccctcaaatgtcagtccaagcaaataccaaagcaacgcatcgattttgtggaagtcaattagagatgtggggagctatcggagacaagcactattgtaccttttcacctccacacttgtcacaagcagggactgtctcctccccactttgcttgccacgcctgccatggcttgagctggggtgaggagtggtctttatcttctttgggagatcctgactggttgcgcacttgctaagggcaggaagtctggagggctgcaggaatggtgccgttgataaacaggtggacttataatcatcatgcactgcaattgtagaacatagtctcctgccttttctcatttgtataattgtctgggtcaatattctcccaatattgggaggggctctgcagccctccag

SEQ ID NO: 133 - DNA, 219 bp, Homo sapiens
  misc_feature 19, 191: n = A,T,C or G
tactgctctaagttttgtnaaatttttcatattttaatttcaagcttattttggagagataggaaggtcatttccatgtatgcataataatcctgcaaagtacaggtactttgtctaagaaacattggaagcaggttaaatgttttgtaaactttgaaatatatggtctaatgtttaagcagaattggaanagactaatatcggttaacaaataacaac

SEQ ID NO: 134 - DNA, 234 bp, Homo sapiens
gattttaaaaacatcatgactttgaactgaaaaacatacacgtttagcacacaaatattgtaatatgaatgaactccaactccatttgaaaacatgtgaatcaaagtacagttttagaagttagtaattcacatttaagcaagttagcgccttgctgaatacagcctttgtaaaaaagagacttagtgcatattttaatggtacattgtggttttgtaccatttggttgagttg

SEQ ID NO: 135 - DNA, 414 bp, Homo sapiens
ctccagcctggctatatccggtcccgctataacctgggcatcagctgcatcaacctcggggctcaccgggaggctgtggagcactttctggaggccctgaacatgcagaggaaaagccggggcccccggggtgaaggaggtgccatgtcggagaacatctggagcaccctgcgtttggcattgtctatgttaggccagagcgatgcctatggggcagccgacgcgcgggatctgtccaccctcctaactatgtttggcctgccccagtgacagtgggacgggctgccctgtgagtgtccacctggggattaaatatgtcttcaacaagggaggcctggcttctacaatggtttaggtaaaggggcctttgaagtagttctggccaggcttgcaatacacacaacacaagagcca

SEQ ID NO: 136 - DNA, 461 bp, Homo sapiens
gaagtgattaataggtttatttgcatatacacagagaagagtcagcattgttgggtgagaagaggcaggctgtgaggaggtaaggcttcagcagaggaaggcaccttgacagacaacacgagactcctattaaatcagcacagttgcaaacttcacctgcctcaagccaacagctcattgaactcatatgtcgattgagaatcatttacaaaaccaggagagaaacaatgggaagagcaacggtctctcatccctggacctgacactcaaaacattatgtacaggatgcaggaacaaaatctgtctgatcagtgccctctcctgctgggaaaaacacccatcacggaagaatttggggattaaatatgtcttcaacaagggaggcctggcttctacaatggtttaggtaaaggggcctttgaagtagttctggccaggcttgcaatacacacaacacaaga

SEQ ID NO: 137 - DNA, 269 bp, Homo sapiens
atagcaaatggacacaaattacaaatgtgtgtgcgtgggacgaagacatctttgaaggtcatgagtttgttagtttaacatcatatatttgtaatagtgaaacctgtactcaaaatataagcagcttgaaactggctttaccaatcttgaaatttgaccacaagtgtcttatatatgcagatctaatgtaaaatccagaacttggactccatcgttaaaattatttatgtgtaacattcaaatgtgtgcattaaatatgcttccacagt

SEQ ID NO: 138 - DNA, 452 bp, Homo sapiens
  misc_feature 414: n = A,T,C or G
ctccatgggaggcaaaatatagagaatttatggtgcccaactcttatgtaatcactggactaatcttccctggtaactatgcaacatttggacagaaaggcacacaaaaaagtttaaatatttcatgtgccaatctggaaaaaaataatttaaatcaacagaacagacagtacatctacacaaatgaggaaagcagaaaagatacctcacattcatttatctcaggtttcaaagtggcttcaatgctaaagtaaatgtattaacatttggaaaatacaagacaatttttttgtttgttttcaatttttttagctctatacaatgattacaacataagacaaaaaaaaaaaaaaaacacaaaaaacaaaacaaaaaaggagttcaggacttgttatcagtgtccaagtggctaanaactggttcccataacaagcattgaaagttaaggcccc

SEQ ID NO: 139 - DNA, 474 bp, Homo sapiens
tgtgcctcattgaggttacaattgaaacagatgtgagcacctgagagactttccctgattatattcctccacaaaccactgtaccatattaccttattttatcttcttgaaattcttattcattggcttgtttgttgtctctttgcattagatatatgtaagctccttggcataaatttgacattggtaggggactgacattctaacctggcccaggccctaggagagagataactccacaaagcagcacatactatcttaggttagcagggagctaactcaccatgtagcagatgaaaaaaaccaaacccagcactgtgcataaataccacttgccaagaagtcaggtcctcggcaaccgagaatcaacctcagcacaaacgcaggtggctgggctctgttcccccttagccaccacctcagcctctcccctcccctgccccaagtgcccaagagcttggctctctgtgcttt

SEQ ID NO: 140 - DNA, 487 bp, Homo sapiens
cttccctgcctcgtgttcctgagaaacggattaatagccctttatccccctgcaccctcctgcaggggatggcactttgagccctctggagccctccccttgctgagccttactctcttcagactttctgaatgtacagtgccgttggttgggatttggggactggaagggaccaaggacactgaccccaagctgtcctgcctagcgtccagcgtcttctaggagggtggggtctgcctgtcctggtgtggttggtttggccctgtttgctgtgactacccccccccctccccgaaccgagggacggctgcctttgtctctgcctcagatgccacctgccccgcccatgctccccatcagcagcatccagactttcaggaagggcagggccagccagtccagaaccgcatccctcagcagggactgataagccatctctcggagggccccctaatacccaagtggagtctggttcacaccctggggg

SEQ ID NO: 141 - DNA, 248 bp, Homo sapiens
  misc_feature 25: n = A,T,C or G
ttaaagatggggaaatgaggcctgnaaatagaaaagatttgcctagagtcacacacactgtcaggtcaggtagagtcaaaatcaggcaccccgactcacagactgcttcacattgccatcagagattgtcctgcaacaatattatgtttagttctactgcagaatgataactggatcttaccccctttgcctgatctggccacaaacttgtttttcaggtctttccattaggctctcttcagctaatt

SEQ ID NO: 142 - DNA, 173 bp, Homo sapiens
tactaagattgtccaagcctccctcttaaaactttctttccctttagaggaatcattacttcgtattaaaagtttctacttccttgtagaatatctacatccaatgggccatggcacaaaatttaagtctagaaagaatcttaaaggctcatcttatagtaaccagaggcagg

SEQ ID NO: 143 - DNA, 511 bp, Homo sapiens
  misc_feature 26: n = A,T,C or G
cctcgtcagaggggtggttcctggtnacctgtactccacggacctcggtgaagcaaaagcttcagggcagagggaatgaggcaacccagtggcagccccgctgggccccgtggctcctgctctcctattggacgtagaggcaggggagagacttctctatacaaatattctcatcacagaagggatgatccttgctgctctgccgtagggtttttgatgctgagctatgctgcacatgacgttaacctaaagaacttggactgagcttttaaaaaaggacagcaaacaattttataatccttaaagtgtaatagacggttacactagtgcagggtattggggaggctctttgggtgtggaggctgtcacttgtatttattgtgactctaaatctttgatagtaaaacaaatgtaaaaagaaatgtttgccaccagatgggaatagaagttccaataagcaggctggaatgggtggctatacgttgtatcacgaggaagttttagactctga

SEQ ID NO: 144 - DNA, 190 bp, Homo sapiens
cattcttctgtcacatgccaattcagttgtcaatcccattgtctatgcttaccggaaccgagacttccgctacacttttcacaaaattatctccaggtatcttctctgccaagcagatgtcaagagtgggaatggtcaggctggggtacagcctgctctcggtgtgggcctatgatctaggctctcgcct

SEQ ID NO: 145 - DNA, 169 bp, Homo sapiens
gatgtggttatctcctcagatggccagtttgccctctcaggctcctgggatggaaccctgcgcctctgggatctcacaacgggcaccaccacgaggcgatttgtgggccataccaaggatgtgctgagtgtggccttctcctctgacaaccggcagattgtctctggat

SEQ ID NO: 146 - DNA, 511 bp, Homo sapiens
atctagagaagatttgggaaacacatgatagctatggttaaatacttaacagggcaatcacagggaagatgactagatttcctaacatccatgagtgaaatttatagaagtatactctctgacttgatataaaggaagattttaaaaaacatgactgttcaggagtgttcaagtagggtcagatgaccagtgattgggaatacttcgtaagcaggagcaagtaagatctgagccactgttctatcggtagggtgtctgtggtattccttggtcaaagaagtactctaagcaacttcagtctcacgaattactatcaccctcgtgggcatacatgatggttaccctaaagaggaagtttcagaaggcagtaatattggatcctggaatagtcagacaggagccttcatgcagatacccttttcagttctccatacacccattcacaagtggtcacaaaaacacccagtacctttacttggctttacccacttaacaatatgctcaatatgag

SEQ ID NO: 147 - DNA, 421 bp, Homo sapiens
  misc_feature 387: n = A,T,C or G
gaccagttgagttcttcctggctattgtataatccacagccacactgtgaaagcaaatctggccagttagcaacacagggagaatctgcctgaactgaccaaaggtgtccatacttcatgtcagtgagaatttcacctccatcatgttctaaagagccaacaacagattctagggcactgcaaaatgcttcagcaattaattgaagttctgtttgagtacattcatcatctttgagaatgctttctgggtcgttgtgagtcttgtgtctgatatatgcagccaaatgagtttcagtacagccacctcccaacaaagcccatggttccttgagtgttaactgcaggacatgcagtgccgtctgacacgtgagcttcagctcatcccangcagtgtcatttctgttgcagagaagccaagctg

SEQ ID NO: 148 - DNA, 237 bp, Homo sapiens
acacaccactgttggccttccatctgggttaagtcaactgtgagtagaaaccgaagataacagttttgtattcataatggccttttcatactccaagtacttttgagcacagagcctcttgcttctgacctggcacttggaacacagatatatatatcttttgttctgtccctgggaaactgatatttgtgtaagacaaccaccagatattttctctaataaaatcttctaaaatta

SEQ ID NO: 149 - DNA, 168 bp, Homo sapiens
agagaaagttaaagtgcaataatgtttgaagacaataagtggtggtgtatcttgtttctaataagataaacttttttgtctttgctttatcttattagggagttgtatgtcagtgtataaaacatactgtgtggtataacaggcttaataaattctttaaaaggagag

SEQ ID NO: 150 - DNA, 68 bp, Homo sapiens
  misc_feature 22: n = A,T,C or G
ggtggggtttggcagagatgantttaagtgctgtggccagaagcggggggggggtttggtggaaattt

SEQ ID NO: 151 - DNA, 421 bp, Homo sapiens
aggtgacacgtattcgggatgaaagtataatagtcattccttcaacccttgcatttatggactctggaaatcgaagatccacagtgagtaaagatgttcgtccaaagacaaaaaatagaaacagctcaacaaagcgagagacaaaaaaacaaaatggcactgtggctctgcctttgaagtctgggctccagcagagggctgatcttcccacaggagacgagacggcctatgacactctccagaactgttgtcagtgccgaattttacttcccttgcccattctaaatgagcaccaggagaagtgccagaggttagctcaccaaaagaaactccagtggggctggtgagatggctcagcgggtaagagcacccgactgctcttccgaaggtccggagttcaaatcccagcaaccacatggtg

SEQ ID NO: 152 - DNA, 507 bp, Homo sapiens
  misc_feature 12, 31, 37, 58, 95, 102, 130, 151, 155, 211, 230, 244, 253,274, 288, 318, 322, 343, 355, 376, 395, 446, 449, 453, 470,475, 482, 484, 488, 497: n = A,T,C or G
gaattcggcacnagctcgtgccgccagggtnggtccnttttttgctccgcctcgccangacttcctacagctatcgccagtcgtcggccacgtcntccttcngaggcctgggcggcggctccgtgcgttntgggccgggggtcgcctttcnctcncccagcattcacgggggctccggcggccgcggcgtatccgtgtcctccgcccgctntgtgtcctcgtcctcctcnggggcctacggctngctgctacngcggcttcctgaccgcttccnacgggctgctggcnggcaacgagaagctaaccatgcagaacctnaacnaccgcctggcctcctacctgnacaaggtgcgcnccctgtaggcggccaacggcnagctagaggtgaagatccnctactgggtaccagaagcaggggcctgggccctgcccgactacagccactnctncacnaccatgcagtacctgcnggganaagattntngggngccaccatngagaactgca

SEQ ID NO: 153 - DNA, 513 bp, Homo sapiens
gaattcggcacgaggtggctcagatgtccactactgggagtatggtcgaattgggaattttattgtgaaaaagcccatggtgctgggacatgaagcttcgggaacagtcgaaaaagtgggatcatcggtaaagcacctaaaaccaggtgatcgtgttgccatcgagcctggtgctccccgagaaaatgatgaattctgcaagatgggccgatacaatctgtcaccttccatcttcttctgtgccgcgccccccgatgacgggaacctctgccggttctataagcacaatgcagccttttgttacaagcttcctgacaatgtcacctttgaggaaggcgccctgatcgagccactttctgtggggatccatgcctgcaggagaggcggagttaccctgggacacaaggtccttgtgtgtggagctgggccaatcgggatggtcactttgctcgtggccaaagcaatgggagcagctcaagtagtggtgactgatctgtctgctacccgattgtc

SEQ ID NO: 154 - DNA, 507 bp, Homo sapiens
  misc_feature 26: n = A,T,C or G
ggcacgagctcgtgccgaattcggcncgagcagacacaatggtaagaatggtgcctgtcctgctgtctctgctgctgcttctgggtcctgctgtcccccaggagaaccaagatggtcgttactctctgacctatatctacactgggctgtccaagcatgttgaagacgtccccgcgtttcaggcccttggctcactcaatgacctccagttctttagatacaacagtaaagacaggaagtctcagcccatgggactctggagacaggtggaaggaatggaggattggaagcaggacagccaacttcagaaggccagggaggacatctttatggagaccctgaaagacatcgtggagtattacaacgacagtaacgggtctcacgtattgcagggaaggtttggttgtgagatcgagaataacagaagcagcggagcattctggaaatattactatgatggaaaggactacattgaattcaacaaagaaatcccagcctgggtcccct

SEQ ID NO: 155 - DNA, 507 bp, Homo sapiens
  misc_feature 27: n = A,T,C or G
ggcacgaggagacctaagggctgagtntcgggaacaggagaaagctctgttggccctccagcagcagtgtgctgagcaggcacaggagcatgaggtggagaccagggccctgcaggacagctggctgcaggcccaggcagtgctcaaggaacgggaccaggagctggaagctctgcgggcagaaagtcagtcctcccggcatcaggaggaggctgcccgggcccgggctgaggctctgcaggaggcccttggcaaggctcatgctgccctgcaggggaaagagcagcatctcctcgagcaggcagaattgagccgcagtctggaggccagcactgcaaccctgcaagcctccctggatgcctgccaggcacacagtcggcagctggaggaggctctgaggatacaagaaggtgagatccaggaccaggatctccgataccaggaggatgtgcagcagctgcagcaggcacttgcccagagggatgaagagctgagacatcagcagga

SEQ ID NO: 156 - DNA, 509 bp, Homo sapiens
  misc_feature 26: n = A,T,C or G
ggcacgaggacagagagaaccctgtngaaagagcgttaccaggaggtcctggacaaacagaggcaagtggagaatcagctccaagtgcaattaaagcagcttcagcaaaggagagaagaggaaatgaagaatcaccaggagatattaaaggctattcaggatgtgacaataaagcgggaagaaacaaagaagaagatagagaaagagaagaaggagtttttgcagaaggagcaggatctgaaagctgaaattgagaagctttgtgagaagggcagaagagaggtgtgggaaatggaactggatagactcaagaatcaggatggcgaaataaataggaacattatggaagagactgaacgggcctggaaggcagagatcttatcactagagagccggaaagagttactggtactgaaactagaagaagcagaaaaagaggcagaattgcaccttacttacctcaagtcaactcccccaacactggagacagttcgttccaaacaggagtg

SEQ ID NO: 157 - DNA, 507 bp, Homo sapiens
ggcacgagggcagccctcctaccggcgcacgtggtgccgccgctgctgcctcccgctcgccctgaacccagtgcctgcagccatggctcccggccagctcgccttatttagtgtctctgacaaaaccggccttgtggaatttgcaagaaacctgaccgctcttggtttgaatctggtcgcttccggagggactgcaaaagctctcagggatgctggtctggcagtcagagatgtctctgagttgacgggatttcctgaaatgttggggggacgtgtgaaaactttgcatcctgcagtccatgctggaatcctagctcgtaatattccagaagataatgctgacatggccagacttgatttcaatcttataagagttgttgcctgcaatctctatccctttgtaaagacagtggcttctccaggtgtaagtgttgaggaggctgtggagcaaattgacattggtggagtaaccttactgagagctgcagccaaaaaccacgctcgagt

SEQ ID NO: 158 - DNA, 507 bp, Homo sapiens
  misc_feature 27, 428, 448, 449, 456, 462, 490, 492, 497, 498, 502, 503: n = A,T,C or G
ggcacgagtcgagctgtgcctattcgngtcaatccaagagtgagtaatgtgaagtctgtctacaaaacccacattgatgtcattcattatcggaaaacggatgcaaaacgtctgcatggccttgatgaagaagcagaacagaaacttttttcagagaaacgtgtggaattgcttaaggaactttccaggaaaccagacatttatgagaggcttgcttcagccttggctccaagcatttatgaacatgaagatataaagaagggaattttgcttcagctctttggcgggacaaggaaggattttagtcacactggaaggggcaaatttcgggctgagatcaacatcttgctgtgtggcgaccctggtaccagcaagtcccagctgctgcagtacgtgtacaacctcgtccccaggggccagtacacgtntgggaagggctccagtgcanntggcctnactgcntacgtaatgaaagaccctgagacaaggnanctggnnctgnnacag

SEQ ID NO: 159 - DNA, 508 bp, Homo sapiens
  misc_feature 6, 8, 25, 26: n = A,T,C or G
ggcacnanaaaccaggattatggtnnggatccaaagattgctaatgcaataatgaaggcagcagatgaggtagctgaaggtaaattaaatgatcattttcctctcgtggtatggcagactggatcaggaactcagacaaatatgaatgtaaatgaagtcattagcaatagagcaattgaaatgttaggaggtgaacttggcagcaagatacctgtgcatcccaacgatcatgttaataaaagccagagctcaaatgatacttttcccacagcaatgcacattgctgctgcaatagaagttcatgaagtactgttaccaggactacagaagttacatgatgctcttgatgcaaaatccaaagagtttgcacagatcatcaagattggacgtactcatactcaggatgctgttccacttactcttgggcaggaatttagtggttatgttcaacaagtaaaatatgcaatgacaagaataaaagctgccatgccaagaatctatgagctcg

SEQ ID NO: 160 - DNA, 508 bp, Homo sapiens
  misc_feature 27: n = A,T,C or G
ggcacgagcttggagcaaagtcatctnaaggaattagaggacacacttcaggttaggcacatacaagagtttgagaaggttatgacagaccacagagtttctttggaggaattaaaaaaggaaaaccaacaaataattaatcaaatacaagaatctcatgctgaaattatccaggaaaaagaaaaacagttacaggaattaaaactcaaggtttctgatttgtcagacacgagatgcaagttagaggttgaacttgcgttgaaggaagcagaaactgatgaaataaaaattttgctggaagaaagcagagcccagcagaaggagaccttgaaatctcttcttgaacaagagacagaaaatttgagaacagaaattagtaaactcaaccaaaagattcaggataataatgaaaattatcaggtgggcttagcagagctaagaactttaatgacaattgaaaaagatcagtgtatttccgagttaattagtagacatgaagaagaatcta

SEQ ID NO: 161 - DNA, 507 bp, Homo sapiens
ggcacgagcgctaccggcgcctcctctgcggccactgagccggagccggcctgagcagcgctctcggttgcagtacccactggaaggacttaggcgctcgcgtggacaccgcaagcccctcagtagcctcggcccaagaggcctgctttccactcgctagccccgccgggggtccgtgtcctgtctcggtggccggacccgggcccgagcccgagcagtagccggcgccatgtcggtggtgggcatagacctgggcttccagagctgctacgtcgctgtggcccgcgccggcggcatcgagactatcgctaatgagtatagcgaccgctgcacgccggcttgcatttcttttggtcctaagaatcgttcaattggagcagcagctaaaagccaggtaatttctaatgcaaagaacacagtccaaggatttaaaagattccatggccgagcattctctgatccatttgtggaggcagaaaaatctaaccttgcatatgatattgtgca

SEQ ID NO: 162 - DNA, 507 bp, Homo sapiens
  misc_feature 27: n = A,T,C or G
ggcacgagcagctgtgcaccgacatgntctcagtgtcctgagtaagaccaaagaagctggcaagatcctctctaataatcccagcaagggactggccctgggaattgccaaagcctgggagctctacggctcacccaatgctctggtgctactgattgctcaagagaaggaaagaaacatatttgaccagcgtgccatagagaatgagctactggccaggaacatccatgtgatccgacgaacatttgaagatatctctgaaaaggggtctctggaccaagaccgaaggctgtttgtggatggccaggaaattgctgtggtttacttccgggatggctacatgcctcgtcagtacagtctacagaattgggaagcacgtctactgctggagaggtcacatgctgccaagtgcccagacattgccacccagctggctgggactaagaaggtgcagcaggagctaagcaggccgggcatgctggagatgttgctccctggccagcctga

SEQ ID NO: 163 - DNA, 460 bp, Homo sapiens
ggcacgagaaataactttatttcattgtgggtcgcggttcttgtttgtggatcgctgtgatcgtcacttgacaatgcagatcttcgtgaagactctgactggtaagaccatcaccctcgaggttgagcccagtgacaccatcgagaatgtcaaggcaaagatccaagataaggaaggcatccctcctgaccagcagaggctgatctttgctggaaaacagctggaagatgggcgcaccctgtctgactacaacatccagaaagagtccaccctgcacctggtgctccgtctcagaggtgggatgcaaatcttcgtgaagacactcactggcaagaccatcacccttgaggtggagcccagtgacaccatcgagaacgtcaaagcaaagatccaggacaaggaaggcattcctcctgaccagcagaggttgatctttgccggaaagcagctggaagatggg

SEQ ID NO: 164 - DNA, 462 bp, Homo sapiens
ggcacgagccggatctcattgccacgcgcccccgacgaccgcccgacgtgcattcccgattccttttggttccaagtccaatatggcaactctaaaggatcagctgatttataatcttctaaaggaagaacagaccccccagaataagattacagttgttggggttggtgctgttggcatggcctgtgccatcagtatcttaatgaaggacttggcagatgaacttgctcttgttgatgtcatcgaagacaaattgaagggagagatgatggatctccaacatggcagccttttccttagaacaccaaagattgtctctggcaaagactataatgtaactgcaaactccaagctggtcattatcacggctggggcacgtcagcaagagggagaaagccgtcttaatttggtccagcgtaacgtgaacatctttaaattcatcattcctaatgttgtaaaata

SEQ ID NO: 165 - DNA, 462 bp, Homo sapiens
ggcacgaggaagccatgagcagcaaagtctctcgcgacaccctgtacgaggcggtgcgggaagtcctgcacgggaaccagcgcaagcgccgcaagttcctggagacggtggagttgcagatcagcttgaagaactatgatccccagaaggacaagcgcttctcgggcaccgtcaggcttaagtccactccccgccctaagttctctgtgtgtgtcctgggggaccagcagcactgtgacgaggctaaggccgtggatatcccccacatggacatcgaggcgctgaaaaaactcaacaagaataaaaaactggtcaagaagctggccaagaagtatgatgcgtttttggcctcagagtctctgatcaagcagattccacgaatcctcggcccaggtttaaataaggcaggaaagttcccttccctgctcacacacaacgaaaacatggtggccaaagtggatg

SEQ ID NO: 166 - DNA, 459 bp, Homo sapiens
  misc_feature 19, 27, 40, 42, 43, 46, 63, 65, 70, 85, 87, 94, 102, 103,106, 144, 149, 166, 202, 209, 215, 216, 221, 310, 315, 332,358, 366, 368, 379, 382, 384, 410, 424, 429, 434: n = A,T,C or G
ggcacgagagggacctgtntgaatggntccactagggttnanntgnctcttacttttaaccantnaaatngacctgcccgtgaanangcgggcntgacacannaanacgagaagaccctatggagctttaatttattaatgcanacagnacctaacaaacccacangtcctaaactaccaagcctgcattaaaaatttcggntggggcnacctcnnagcanaacccaacctccgagcaactcatgctaagacttcaccagtcaaagctgaactactatactcaattgatccaataacttgaccaacagancaagntaccctagggataacancacaatcctattctagaccccttatnaccaatangntttacacctcnatngnggaaccaggacatccgatggggcagncgttattaaagttngttgntaacnataaagtctacgtgatctgagttag

SEQ ID NO: 167 - DNA, 464 bp, Homo sapiens
  misc_feature 17, 20, 22, 28, 33, 40, 45, 46, 55, 82, 99, 108, 115, 132,150, 171, 182, 192, 244, 252, 276, 306, 313, 318, 320, 332,352, 370, 376, 377, 378, 393, 395, 399, 403, 420, 434, 435,455, 456: n = A,T,C or G
gaattgggaccaacganaancntgcggntcttnttttgcntccanngcccagctnattgctcagacacacatggggaaggtnaaggtcgggagtcaacngatttggtngtattgnagcgtttggtcaccagngctgcttttaactctggnaaagtggatattgttgtcatnaatgacccctncattgacctnaactacatggtttacatgttccaatatgattccacccatggcaaattccatngcaccgtnaaggctgagaacgggaagcttgtnatcaatggaaatcccatcaccatctttcangaacganatccntncaaaaatcaaanttgggggcgatgcttggccncttgaagtaccgttcaangggaannnccccactttggccgntntttncaancccaccccaatttgggnaaaaaaaaaggggnntttgggggggggccttttanntttttttt

SEQ ID NO: 168 - DNA, 462 bp, Homo sapiens
  misc_feature 10, 11, 12, 18, 42, 47, 83, 84, 88, 91, 100, 123, 172, 174,177, 189, 192, 196, 199, 204, 210, 216, 218, 228, 231, 232,236, 240, 249, 251, 259, 263, 264, 269, 272, 275, 278, 280,287, 292, 294, 305, 310, 328, 329, 335, 345, 349, 357: n = A,T,C or G
  misc_feature 375, 377, 446, 455: n = A,T,C or G
ggcacgaggnnnaacctncggggctggggcagcacgccttgngcaancctgcactgcactgaagacccggtgccggaagccgnnggcngcnacatgcagnaactgaaccagctgggcgcgcancagttctcagacctgacagaggtgcttttacacttcctaactgatccanantangtggaaatattnttngttnatntcatntgaatnatccancnccaatcatancanntttnattncctcataancnttgagaanagcnnccttntgnttncananggtgctntgaanangagtctcacangcaancaggtccaagcggatttnntaactntgggtcttantgangagaaagncacttacttttctgaaancnggaagcagaatgctcccacccttgctcgatgggccatacgtcaagactctgatgattaaccagctttanatatggacnggaaatt

SEQ ID NO: 169 - DNA, 460 bp, Homo sapiens
  misc_feature 20, 64, 69, 71, 73, 91, 109, 113, 151, 237, 238, 241, 255,266, 269, 280, 290, 302, 312, 318, 329, 334, 355, 357, 359,376, 379, 380, 382, 397, 409, 410, 415, 422, 442, 446, 452: n = A,T,C or G
ggcacgagggacagcagacnagacagtcacagcagccttgacaaaacgttcctggaactcaagntcttntncncaaaggaggacagagcanacagcagagaccatggantctncctcggcccctccccacagatggtgcatcccctggcanaggctcctgctcacagcctcacttctaaccttctggaacccgcccaccactgccaagctcactattgaatccacgccgttcaatgnntcntaggggaaggaggngctttctactnttncacaatctganccccttcttntttggttactancatggctctncatgtnaaaatactggnatggntaacctgtcaaatttataggnantntgctaattgggaaactnccnntngtctaccccaggggncccagattcctnngttcncataacnattaatttaacccctaatgncaancccttngttaaaga

SEQ ID NO: 170 - DNA, 508 bp, Homo sapiens
  misc_feature 27: n = A,T,C or G
ggcacgagggggatttttaggtggtcnggtgtggtatcaggaataatgtgggaggccagattgaagtccaggccaggaacaatggtaattgtgggacttaagaaagtgtgagtacagctgaatgagccggggagcagaaagtatatgcgtcaggtatgaggaagaaaatagattttggaagttatgagaaatgtagagagtgagttgagcatagtttgtgattttgagggcctctaacagtattaaagcagcggcagcggctgcacacagacatgatggctaggctaaaacaggaaggtcaagttgtttggacagaaaggctacagggtgcagtcctggctcttgtgtaagaattctgaccacactaaccatgcctaggaaggaaaggagttgttcttttgtaagggattgaggtttgggagattaatcggacacgatcagcagggagagcacctgtgtttttatgagaattatgctgagataggtaacagatgaggatgaaatttgg

SEQ ID NO: 171 - DNA, 507 bp, Homo sapiens
  misc_feature 26: n = A,T,C or G
ggcacgagaccagccactagcgcagnctcgagcgatggcctatgtccccgcaccgggctaccagcccacctacaacccgacgctgccttactaccagcccatcccgggcgggctcaacgtgggaatgtctgtttacatccaaggagtggccagcgagcacatgaagcggttcttcgtgaactttgtggttgggcaggatccgggctcagacgtcgccttccacttcaatccgcggtttgacggctgggacaaggtggtcttcaacacgttgcagggcgggaagtggggcagcgaggagaggaagaggagcatgcccttcaaaaagggtgccgcctttgagctggtcttcatagtcctggctgagcactacaaggtggtggtaaatggaaatcccttctatgagtacgggcaccggcttcccctacagatggtcacccacctgcaagtggatggggatctgcaacttcaatcaatcaacttcatcggaggccagcccctccggcccca

SEQ ID NO: 172 - DNA, 409 bp, Homo sapiens
ggcacgagctggagtgtctgctgccaccccctcgtcctctgcagaaatgtctgtcacctacgatgactctgtgggagtggaagtgtccagcgacagcttctgggaggttgggaactacaaacggactgtgaagcggattgacgatggccaccgcctgtgtggtgacctcatgaactgtctgcatgagcgggcacgcatcgagaaggcgtatgcacagcagctcactgagtgggcccgacgctggaggcagctggtagagaagggaccacagtatgggaccgtggagaaggcctggatagctgtcatgtctgaagcagagagggtgagtgaactgcacctggaagtgaaggcatcactgatgaatgaagactttgagaagatcaagaactggcagaaggaagcctttcac

SEQ ID NO: 173 - DNA, 409 bp, Homo sapiens
ggcacgagggcagctagaggaagagtccaaggccaagaacgcactggcccacgccctgcagtcagctcgccatgactgtgacctgctgcgggaacagtatgaagaggagcaggaagccaaggctgagctgcagagggccatgtccaaggccaacagcgaggtagcccagtggaggacgaaatatgagacggatgccatccagcgcacagaggagctggaagaggccaagaagaagctggctcagcgtctgcaggatgctgaggaacatgtagaagctgtgaattccaaatgcgcttctcttgaaaagacgaagcagcgacttcagaatgaagtggaggacctcatgattgacgtggagaggtctaatgctgcctgcgctgcgcttgataagaagcagaggaactttgac

SEQ ID NO: 174 - DNA, 407 bp, Homo sapiens
ggcacgagccggggcggggcgcggcgctccggctcgaggcattcggagctgcgggagccgggctggcaggagcaggatggcggcggcggcggctgcaggcgaggcgcgccgggtgctggtgtacggcggcaggggcgctctgggttctcgatgcgtgcaggcttttcgggcccgcaactggtgggttgccagcgttgatgtggtggagaatgaagaggccagcgctagcatcattgttaaaatgacagactcgttcactgagcaggctgaccaggtgactgctgaggttggaaagctcttgggtgaagagaaggtggatgcaattctttgcgttgctggaggatgggccgggggcaatgccaaatccaagtctctctttaagaactgtgacctgatgtggaagcaga

SEQ ID NO: 175 - DNA, 407 bp, Homo sapiens
ggcacgagcttgcccgtcggtcgctagctcgctcggtgcgcgtcgtcccgctccatggcgctcttcgtgcggctgctggctctcgccctggctctggccctgggccccgccgcgaccctggcgggtcccgccaagtcgccctaccagctggtgctgcagcacagcaggctccggggccgccagcacggccccaacgtgtgtgctgtgcagaaggttattggcactaataggaagtacttcaccaactgcaagcagtggtaccaaaggaaaatctgtggcaaatcaacagtcatcagctacgagtgctgtcctggatatgaaaaggtccctggggagaagggctgtccagcagccctaccactctcaaacctttacgagaccctgggagtcgttggatccaccaccac

SEQ ID NO: 176 - DNA, 409 bp, Homo sapiens
ggcacgagtggtgccaaaacgggaccatgccctcctggaggagcagagcaagcagcagtccaacgagcacctgcgccgccagttcgccagccaggccaatgttgtggggccctggatccagaccaagatggaggagatcgggcgcatctccattgagatgaacgggaccctggaggaccagctgagccacctgaagcagtatgaacgcagcatcgtggactacaagcccaacctggacctgctggagcagcagcaccagctcatccaggaggccctcatcttcgacaacaagcacaccaactataccatggagcacatccgcgtgggctgggagcagctgctcaccaccattgcccgcaccatcaacgaggtggagaaccagatcctcacccgcgacgccaagggcatc

SEQ ID NO: 177 - DNA, 408 bp, Homo sapiens
ggcacgaggtccaggtaactgcaaaaacaatggctcagcatgaagaactgatgaagaaaactgaaacaatgaatgtagttatggagaccaataaaatgctaagagaagagaaggagcaggtttcaaaaatggcatcagtccgtcagcatttggaagaaacaacacagaaagcagaatcacagttgttggagtgtaaagcatcttgggaggaaagagagagaatgttaaaggatgaagtttccaaatgtgtatgtcgctgtgaagatctggagaaacaaaacagattacttcatgatcagatcgaaaaattaagtgacaaggtcgttgcctctgtgaaggaaggtgtacaaggtccactgaatgtatctctcagtgaagaaggaaaatctcaagaacaaattttggaaa

SEQ ID NO: 178 - DNA, 92 bp, Homo sapiens
ggcacgagaagaaattaagagctaaagacaaggagaatgaaaatatggttgcaaagctgaacaaaaaagttaaagagctagaagaggagatg

SEQ ID NO: 179 - DNA, 411 bp, Homo sapiens
ggcacgaggagacacgccacctataccacagttctcagaatgaattagctaagttggaatcagaacttaagagtctcaaagaccagttgactgatttaagtaactctttagaaaaatgtaaggaacaaaaaggaaacttggaagggatcataaggcagcaagaggctgatattcaaaattctaagttcagttatgaacaactggagactgatcttcaggcctccagagaactgaccagtaggctgcatgaagaaataaatatgaaagagcaaaagattataagcctgctttctggcaaggaagaggcaatccaagtagctattgctgaactgcgtcagcaacatgataaagaaattaaagagctggaaaacctgctgtcccaggaggaagaggagaatattgttttagaag

SEQ ID NO: 180 - DNA, 411 bp, Homo sapiens
ggcacgaggttgttcggagcgggcgagcggagttagcagggctttactgcagagcgcgccgggcactccagcgaccgtggggatcagcgtaggtgagctgtggccttttgcgaggtgctgcagccatagctacgtgcgttcgctacgaggattgagcgtctccacccatcttctgtgcttcaccatctacataatgaatcccagtatgaagcagaaacaagaagaaatcaaagagaatataaagactagttctgtcccaagaagaactctgaagatgattcagccttctgcatctggatctcttgttggaagagaaaatgagctgtccgcaggcttgtccaaaaggaaacatcggaatgaccacttaacatctacaacttccagccctggggttattgtcccagaatctag

SEQ ID NO: 181 - DNA, 411 bp, Homo sapiens
ggcacgaggcgggacagggcgaagcggcctgcgcccacggagcgcgcgacactgcccggaagggaccgccacccttgccccctcagctgcccactcgtgatttccagcggcctccgcgcgcgcacgatgccctcggccaccagccacagcgggagcggcagcaagtcgtccggaccgccaccgccgtcgggttcctccgggagtgaggcggccgcgggagccggggccgccgcgccggcttctcagcaccccgcaaccggcaccggcgctgtccagaccgaggccatgaagcagattctcggggtgatcgacaagaaacttcggaacctggagaagaaaaagggtaagcttgatgattaccaggaacgaatgaacaaaggggaaaggcttaatcaagatcagctggatgcc

SEQ ID NO: 182 - DNA, 411 bp, Homo sapiens
ggcacgagccgacatggagctgttcctcgcgggccgccgggtgctggtcaccggggcaggcaaaggtatagggcgcggcacggtccaggcgctgcacgcgacgggcgcgcgggtggtggctgtgagccggactcaggcggatcttgacagccttgtccgcgagtgcccggggatagaacccgtgtgcgtggacctgggtgactgggaggccaccgagcgggcgctgggcagcgtgggccccgtggacctgctggtgaacaacgccgctgtcgccctgctgcagcccttcctggaggtcaccaaggaggcctttgacagatcctttgaggtgaacctgcgtgcggtcatccaggtgtcgcagattgtggccaggggcttaatagcccggggagtcccaggggccatcgtgaa

SEQ ID NO: 183 - DNA, 409 bp, Homo sapiens
ggcacgagcctacactctggccagagataccacagtcaaacctggagccaaaaaggacacaaaggactctcgacccaaactgccccagaccctctccagaggttggggtgaccaactcatctggactcagacatatgaagaagctctatataaatccaagacaagcaacaaacccttgatgattattcatcacttggatgagtgcccacacagtcaagctttaaagaaagtgtttgctgaaaataaagaaatccagaaattggcagagcagtttgtcctcctcaatctggtttatgaaacaactgacaaacacctttctcctgatggccagtatgtccccaggattatgtttgttgacccatctctgacagttagagccgatatcactggaagatattcaaatcgtctc

SEQ ID NO: 184 - DNA, 410 bp, Homo sapiens
ggcacgaggtcattccagcaccaacaggatccaagccagattgattgggctgcattggcccaagcttggattgcccaaagagaagcttcaggacagcaaagcatggtagaacaaccaccaggaatgatgccaaatggacaagatatgtctacaatggaatctggtccaaacaatcatgggaatttccaaggggattcaaacttcaacagaatgtggcaaccagaatggggaatgcatcagcaacccccacacccccctccagatcagccatggatgccaccaacaccaggcccaatggacattgttcctccttctgaagacagcaacagtcaggacagtggggaatttgcccctgacaacaggcatatatttaaccagaacaatcacaactttggtggaccacccgataa

SEQ ID NO: 185 - DNA, 411 bp, Homo sapiens
  misc_feature 366: n = A,T,C or G
ggcacgagcacagatgtagttttctctgcgcgtgtgcgttttccctcctcccccgccctcagggtccacggccaccatggcgtattaggggcagcagtgcctgcggcagcattggcctttgcagcggcggcagcagcaccaggctctgcagcggcaacccccagcggcttaagccatggcgcttctcacggcattcagcagcagcgttgctgtaaccgacaaagacaccttcgaattaagcacattcctcgattccagcaaagcaccgcaacatgaccgaaatgagcttcctgagcagcgaggtgttggtgggggacttgatgtcccccttcgacccgtcgggtttgggggctgaagaaagcctangtctcttagatgattacctggaggtggccaagcacttcaaacctc

SEQ ID NO: 186 - DNA, 410 bp, Homo sapiens
ggcacgagcttctagtcccgccatggccgctctcacccgggacccccagttccagaagctgcagcaatggtaccgcgagcaccgctccgagctgaacctgcgccgcctcttcgatgccaacaaggaccgcttcaaccacttcagcttgaccctcaacaccaaccatgggcatatcctggtggattactccaagaacctggtgacggaggacgtgatgcggatgctggtggacttggccaagtccaggggcgtggaggccgcccgggagcggatgttcaatggtgagaagatcaactacaccgagggtcgagccgtgctgcacgtggctctgcggaaccggtcaaacacacccatcctggtagacggcaaggatgtgatgccagaggtcaacaaggttctggacaagatga

SEQ ID NO: 187 - DNA, 506 bp, Homo sapiens
ctttcgtggctcactccctttcctctgctgccgctcggtcacgcttgtgcccgaaggaggaaacagtgacagacctggagactgcagttctctatccttcacacagctctttcaccatgcctggatcacttcctttgaatgcagaagcttgctggccaaaagatgtgggaattgttgcccttgagatctattttccttctcaatatgttgatcaagcagagttggaaaaatatgatggtgtagatgctggaaagtataccattggcttgggccaggccaagatgggcttctgcacagatagagaagatattaactctctttgcatgactgtggttcagaatcttatggagagaaataacctttcctatgattgcattgggcggctggaagttggaacagagacaatcatcgacaaatcaaagtctgtgaagactaatttgatgcagctgtttgaagagtctgggaatacagatatagaaggaatcgacacaactaatgcatgctat

SEQ ID NO: 188 - DNA, 506 bp, Homo sapiens
gccacagaggcggcggagagatggccttcagcggttcccaggctccctacctgagtccagctgtccccttttctgggactattcaaggaggtctccaggacggacttcagatcactgtcaatgggaccgttctcagctccagtggaaccaggtttgctgtgaactttcagactggcttcagtggaaatgacattgccttccacttcaaccctcggtttgaagatggagggtacgtggtgtgcaacacgaggcagaacggaagctgggggcccgaggagaggaagacacacatgcctttccagaaggggatgccctttgacctctgcttcctggtgcagagctcagatttcaaggtgatggtgaacgggatcctcttcgtgcagtacttccaccgcgtgcccttccaccgtgtggacaccatctccgtcaatggctctgtgcagctgtcctacatcagcttccagcctcccggcgtgtggcctgccaacccggctcccattacccag

SEQ ID NO: 189 - DNA, 399 bp, Homo sapiens
ctggacaggagaagagcctggctgctgaaggcagggctgacacgaccacgggcagcattgctggagccccagaggatgaaagatcgcagagcacagccccccaggcaccagagtgcttcgaccctgccggaccggctgggctcgtgaggccgacatctggcctttcccagggcccaggaaaggaaaccttggaaagtgctctaatcgctctagactctgaaaaacccaagaaacttcgcttccacccaaagcagctgtacttctctgccaggcagggtgagctgcagaaggtgcttctcatgctggttgatggaattgatcccaacttcaaaatggagcaccaaagtaagcgttccccattacatgctgctgcggaggctggccacgtggacatctgcc

SEQ ID NO: 190 - DNA, 401 bp, Homo sapiens
cggcgacggtggtggtgactgagcggagcccggtgacaggatgttggtgttggtattaggagatctgcacatcccacaccggtgcaacagtttgccagctaaattcaaaaaactcctggtgccaggaaaaattcagcacattctctgcacaggaaacctttgcaccaaagagagttatgactatctcaagactctggctggtgatgttcatattgtgagaggagacttcgatgagaatctgaattatccagaacagaaagttgtgactgttggacagttcaaaattggtctgatccatggacatcaagttattccatggggagatatggccagcttagccctgttgcagaggcaatttgatgtggacattcttatctcgggacacacacacaaatttgaag

SEQ ID NO: 191 - DNA, 406 bp, Homo sapiens
tggcagcctaagccgtgggagggttccagtcgagaatgggaagatgaaagacttcagatggaacagaaataaatgccttttttgacaaacgcagcagtgcgtgcctctagcttgcaagagcgttactccccttcatagctttaaaaggttttcgcactgcgtgcagttagagtagctaaatcttgtgtgacgctccacaaacacttgtaagaattttgcagagaaagataaccgttgccacccaatgccccccacaggcattctactccccagtacctcttagggtgggagaaatggtgaagagttgttcctacaacttgctaacctagtggacagggtagtagattagcatcatccggatagatgtgaagaggacggctgtttggataataattaaggataaaat

SEQ ID NO: 192 - DNA, 316 bp, Homo sapiens
cccggggaggccctggtcataaaactttaaattttactagtgttacttaatgtatattctaaaaagagaatgcagtaactaatgccctaaatgtttgatctctgtttgtcattactttttcaaaattatttttttctgtaaagtataatatataaaacttcttgcttaaattgaatttctatattagtggttaattgcagtttattaaagggatcattatcagtaatttcatagcaactgttctagtgttttgtgtttttaaaacagaattaggaatttgagatatctgattatatttttcatatgaatcacagac

SEQ ID NO: 193 - DNA, 146 bp, Homo sapiens
gaaacatggactgccccttaaattttgactgtcctaaaaacctatttctgatttataatatgctgcctgataaagtgacactagatgtaccagctgagtgtttaatcttcccatcacagatcagatttgagcattaacaggtattt

SEQ ID NO: 194 - DNA, 405 bp, Homo sapiens
cggatgtgctcactgacattctactccaagtcggagatgcagatccactccaagtcacacaccgagaccaagccccacaagtgcccacattgctccaagaccttcgccaacagctcctacctggcccagcacatccgtatacactcaggggctaagccctacagttgtaacttctgtgagaaatccttccgccagctctcccaccttcagcagcacacccgaatccacactggtgatagaccatacaaatgtgcacacccaggctgtgagaaagccttcacacaactctccaatctgcagtcccacagacggcaacacaacaaagataaacccttcaagtgccacaactgtcatcgggcgtacacggatgcagcctcactagaggtgcacctgtctacgcacaca

SEQ ID NO: 195 - DNA, 421 bp, Homo sapiens
agaattcggcacgagctactccttgcgcgctggcactccgcagcctttaaggttcgcgcgggggccaggcaagagttagccatgaagagcctcaagtcccgcctgaggaggcaggacgtgcccggccccgcgtcgtctggcgccgccgccgccagcgcgcatgcagcagattggaataaatatgatgaccgattgatgaaagcagcagaaaggggggatgtagaaaaagtgacgtcaatccttgctaaaaagggggtcaatccaggcaaactagatgtggaaggcagatctgtcttccatgttgtgacctcaaaggggaatcttgagtgtttgaatgccatccttatacatggagttgatattacaaccagtgacactgcagggagaaatgctcttcacctggctgctaagtatggacatg

SEQ ID NO: 196 - DNA, 476 bp, Homo sapiens
agaattgatctatagatttaatgcaatgcctactaaaatcccagtacgattttttacaggcatagacaatagacatagccaaaacttattctaaaatacatatgaagatgcacaggccctagttatacaatcttgacaaagaagaataaagtgggaagaatctatttgattttaaggcttaccatgtaactacagtcatcaagagagtgtggtatcggcagacggtcagacatacagatcaatggaatgtaacagaggacccagaaataggcccacacagatatgctcaatggatatttgacaagcgtgcaaaacaattcaatggaagaataagctttcaaaaaaatggcgttggagcaaccggacatccataggaaaaaatgaacccatacctaaaccataaaccttatataaaaataaacacaaaatgaatcataggcttaaatgtaagctataaaacttttagagaaaaacac

SEQ ID NO: 197 - DNA, 503 bp, Homo sapiens
tagccctcggtgaagccccagaccacagctatgagtcccttcgtgtgacgtctgcgcagaaacatgttctgcatgtccagctcaaccggcccaacaagaggaatgccatgaacaaggtcttctggagagagatggtagagtgcttcaacaagatttcgagagacgctgactgtcgggcggtggtgatctctggtgcaggaaaaatgttcactgcaggtattgacctgatggacatggcttcggacatcctgcagcccaaaggagatgatgtggcccggatcagctggtacctccgtgacatcatcactcgataccaggagaccttcaacgtcatcgagaggtgccccaagcccgtgattgctgccgtccatgggggctgcattggcggaggtgtggaccttgtcaccgcctgtgacatccggtactgtgcccaggatgctttcttccaggtgaaggaggtggacgtgggtttggctgcccatgtaggaacactgcagcgcctg

SEQ ID NO: 198 - protein, 168 aa, Homo sapiens
FVAHSLSSAAARSRLCPKEETVTDLETAVLYPSHSSFTMPGSLPLNAEACWPKDVGIVALEIYFPSQYVDQAELEKYDGVDAGKYTIGLGQAKMGFCTDREDINSLCMTVVQNLMERNNLSYDCIGRLEVGTETIIDKSKSVKTNLMQLFEESGNTDIEGIDTTNACY

SEQ ID NO: 199 - protein, 168 aa, Homo sapiens
HRGGGEMAFSGSQAPYLSPAVPFSGTIQGGLQDGLQITVNGTVLSSSGTRFAVNFQTGFSGNDIAFHFNPRFEDGGYVVCNTRQNGSWGPEERKTHMPFQKGMPFDLCFLVQSSDFKVMVNGILFVQYFHRVPFHRVDTISVNGSVQLSYISFQPPGVWPANPAPITQ

SEQ ID NO: 200 - protein, 132 aa, Homo sapiens
GQEKSLAAEGRADTTTGSIAGAPEDERSQSTAPQAPECFDPAGPAGLVRPTSGLSQGPGKETLESALIALDSEKPKKLRFHPKQLYFSARQGELQKVLLMLVDGIDPNFKMEHQSKRSPLHAAAEAGHVDIC

SEQ ID NO: 201 - protein, 120 aa, Homo sapiens
MLVLVLGDLHIPHRCNSLPAKFKKLLVPGKIQHILCTGNLCTKESYDYLKTLAGDVHIVRGDFDENLNYPEQKVVTVGQFKIGLIHGHQVIPWGDMASLALLQRQFDVDILISGHTHKFE

SEQ ID NO: 202 - protein, 135 aa, Homo sapiens
RMCSLTFYSKSEMQIHSKSHTETKPHKCPHCSKTFANSSYLAQHIRIHSGAKPYSCNFCEKSFRQLSHLQQHTRIHTGDRPYKCAHPGCEKAFTQLSNLQSHRRQHNKDKPFKCHNCHRAYTDAASLEVHLSTHT

SEQ ID NO: 203 - protein, 135 aa, Homo sapiens
LLLARWHSAAFKVRAGARQELAMKSLKSRLRRQDVPGPASSGAAAASAHAADWNKYDDRLMKAAERGDVEKVTSILAKKGVNPGKLDVEGRSVFHVVTSKGNLECLNAILIHGVDITTSDTAGRNALHLAAKYGH

SEQ ID NO: 204 - protein, 167 aa, Homo sapiens
ALGEAPDHSYESLRVTSAQKHVLHVQLNRPNKRNAMNKVFWREMVECFNKISRDADCRAVVISGAGKMFTAGIDLMDMASDILQPKGDDVARISWYLRDIITRYQETFNVIERCPKPVIAAVHGGCIGGGVDLVTACDIRYCAQDAFFQVKEVDVGLAAHVGTLQRL

SEQ ID NO: 205 - DNA, 381 bp, Homo sapiens
aaatttgggatcatcgcctgttctgaaaactagatgcaccaaccgtatcattatttgtttgaggaaaaaaagaaatctgcattttaattcatgttggtcaaagtcgaattactatctatttatcttatatcgtagatctgataaccctatctaaaagaaagtcacacgctaaatgtattcttacatagtgcttgtatcgttgcatttgttttaatttgtggaaaagtattgtatctaacttgtattactttggtagtttcatctttatgtattattgatatttgtaattttctcaactataacaatgtagttacgctacaacttgcctaaaacattcaaacttgttttcttttttctgttgttttctttgttaattcattt

SEQ ID NO: 206 - DNA, 514 bp, Homo sapiens
aaaagtaaattgcataaaattacatccaatttctttctctaaaccaacatattcttcaccttcacaaagcaaacacatggtgcactgaaaccgaggtgttaccagctttacatactgttctgccatttgtggggggtgcaaccacaacataagtcagaaaaaaagctatccagcttttcgtggaatctggtgaagtttacacttagcgataagcctctaagcctgaacttagcagggctagcaaaactttatttatttcctaactcctattattttagaatggttttcaaaataatactgcaagttcctaattgaaatacaaaacagaacaaaaagctgtgagaaatctttttttttctttggctccttaaagacttggaataatttatattagtgttgcatacattttaccttctacattttgatgtacttgctcttgaaagcactagaacaaattaattgaaataaaacctctctgaaaccatttgaatctttgatcctaccatagagtttt

SEQ ID NO: 207 - DNA, 522 bp, Homo sapiens
  misc_feature 24: n = A,T,C or G
caagcttttggtgcatagcagccngcctggaagcattctgagtgctctgtctgccctggtgggtttcattatcctgtctgtcaaacaggccaccttaaatcctgcctcactgcagtgtgagttggacaaaaataatataccaacaagaagttatgtttcttacttttatcatgattcactttataccacggactgctatacagccaaagccagtctggctggaactctctctctgatgctgatttgcactctgctggaattctgcctagctgtgctcactgctgtgctgcggtggaaacaggcttactctgacttccctgggagtgtacttttcctgcctcacagttacattggtaattctggcatgtcctcaaaaatgactcatgactgtggatatgaagaactattgacttcttaagaaaaaagggagaaatattaatcagaaagttgattcttatgataatatggaaaagttaaccattatagaaaagcaaagcttgagtttcctaaatgtaagctttt

SEQ ID NO: 208 - DNA, 278 bp, Homo sapiens
aaaatgcactaccccttttttccaacacggagcttaaaacaaattaatgaaagagtggaaaattcaaaataagggcaagagataaggttttttttttttttcctttaagatagactcaggataggtagatagctttcactgatgtagatgtggaataaattattacttcaggaaaaaaattcccaaacatcttatgaaaaagtatacaactctacttcaaaatatgctatttactcactgccaaagacagttttatttgaaatcttgtttctgtattt

SEQ ID NO: 209 - DNA, 234 bp, Homo sapiens
  misc_feature 26: n = A,T,C or G
cctcccaaatttagcaggtgctgggnaggaccctagggagtggtttatgggggctagctggtgaaactgccctttcctttctgttctatgagtgtgatggtgtttgagaaaatgtggggctatggttcaggcgcacttcacatgtgcaaagatggagaaagcactcacctacacgtttaggctcagaatgttgattgaaacattttgaatgatcaaaaataaaatgttattttt

SEQ ID NO: 210 - DNA, 186 bp, Homo sapiens
  misc_feature 25: n = A,T,C or G
aaaataactgatggcaaaataaaanatttacatcacatcatactgtgtaaacatgtaaggtctctgtacaaagaaatatacatgcaaaataatgtaaaaatttaactgaaataataaaagaaacaatacacaaataaaaattatgaggttacgaatacacatccagtttcgaatccaatttctttt

SEQ ID NO: 211 - DNA, 403 bp, Homo sapiens
aaaaattggtaaaatatttaagtacaaaataagtagcttccagcgaggtttttataccatagtaagagcacacaatagatattactagcacacatgggttatctgggagcgctatagctacaataaacctaattatggaacagaaatttgcattctgtttccagtgctactacactcctactttctcaaaagtctgctctattaatatcagctcagtgcagtttactatgaatagtttatgtctgtgatgcaaagcattaattgttctctttttacaaacatacatttttttcataaggaagactgggggaaaacccagaaacatacagagaaaaggaaagcatcatcaaatatatgttaaaaattaagatgatgtttactactagtcatcctacaacaattt

SEQ ID NO: 212 - DNA, 345 bp, Homo sapiens
cctctttatgagttcattactgctgttcagtctcggcacacagacacccctgtgcaccggggtgtactttctactctgatcgctgggcctgtggttgagataagtcaccagctacggaaggtttctgacgtagaagagcttacccctccagagcatctttctgatcttccaccattttcaaggtgtttaataggaataataataaagtcttcgaatgtggtcaggtcatttttggatgaattaaaggcatgtgtggcttctaatgatattgaaggcattgtgtgcctcacggctgctgtgcatattatcctggttattaatgcaggtaaacataaaagctcaaaa

SEQ ID NO: 213 - DNA, 318 bp, Homo sapiens
aaaatgttttattattttgaaaataatgttgtaattcatgccagggactgacaaaagacttgagacaggatggttattcttgtcagctaaggtcacattgtgcctttttgaccttttcttcctggactattgaaatcaagcttattggattaagtgatatttctatagcgattgaaagggcaatagttaaagtaatgagcatgatgagagtttctgttaatcatgtattaaaactgatttttagctttacaaatatgtcagtttgcagttatgcagaatccaaagtaaatgtcctgctagctagttaaggattgtttt

SEQ ID NO: 214 - DNA, 462 bp, Homo sapiens
aaacacatctggttctggcagcaagttatattatgcatttagagcaataggtgccctgaaagttattgttgctttttttgttttttttttcagtttgtgcgtgtcacttgaatcagaaaccaaacacatgtaaaaaaatatcatcctcaatgccccccattaactctctctccagaaggtgacaatgttagtgaactcaagactctcactgatgatggtattttacaatgaaaacacaaggaaaccctttgaggtccaattttcacatcatattctccaaatagtaaaatagcagctctacatgttgatgaaaagaaatttcaatttcttcctatttgtttttactcatatcaacattaatatgtatctggatttattaatttccaaaaagaaaattttagttaccaaatatttcagaaatttaataaagcattatatatatgtaattagcacttatctacc

SEQ ID NO: 215 - DNA, 280 bp, Homo sapiens
aaacttttctgaaacgattagctgtagccaaattatgtggttacgttttgctacattagaatttgaaaatgcaatatgtgtggtaaatctactgtttgaaatttataatggtctctgatatgattcgaattttggtaacttttgaaagttattttccccctttagtcatggatttctatttgttttttaatgttaatttttctagaaagcatctgaattgactaggcttttcctatataaaaaactcaaaacttgttaactctgtactttaataaaattt

SEQ ID NO: 216 - DNA, 210 bp, Homo sapiens
aaaatctctggcttcaaagtttcttggggaaaggtcggtttacctcacattttttgtttccattagtaatattctaggtacctcacaaaatgtattatggtgccatggctgttagtttttagtgagtgctgtaggattaattcgaaaataggcagaattccattcctcccaaggtggcaaaaattagctatactgatgtaattgtcattt

SEQ ID NO: 217 - DNA, 398 bp, Homo sapiens
ctggagctgctagaacttgagatgagggcaagagcgattaaagccctaatgaaagctggtgatataaaaaagccagcctaggtatttaacttgattttgaattttaggtatgtttgaacaaagccacatcatttaattttgtatctaaaatttatttggggtcttatatgttatttctcatgtaacccttattaggactcattttagccctaaattacctgtggctgtttctttttatttttttgactacttttatattataaatgtgtgttactgtcttatgaattcatggcaatatagttggatagcctggatactttgttagatgagtatttagctgtgtctgcaaatcttaaaagccattagcaaagagtcgtggtatttttttctttattttt

SEQ ID NO: 218 - DNA, 487 bp, Homo sapiens
ctgccgccggtcaggctggttaaagatcaggtcccccaggaccttgcgatttatgtcgccattctccagcaagacctcagtgccgaagacctctacgatgcgccggtgggcagggtatcctggctgcacgacgtgccgggccatcacgtccacgtcaatcaccgcacagcccagtttcagtgtttttacacattatattgttataatctcacaataactataaattaggtagaacaggaaatgaggtttggagaagatacttgacttatccgaccatctgtacttgtcccatagtaaggagcctcaagcagagacaaaggaggaagttgcctatgttgtatggtttacaggccataaatgaatgtcatctttttcctcccctggggaaaaatgtctcaaaaatcccaccataggacatgacatctccagaacctctattacaaaatacacatttcctgtagaggggtaacaaatttgggttaacctg

SEQ ID NO: 219 - DNA, 390 bp, Homo sapiens
aaaaaatacaccacacgatacaactcaatacaggagtatttcttctcaaattcttctagcaccatcaacattcttcaagtatctgaaatactattaattagcacctttgtattatgaacaaaacaaaacaaggacctcagttcatctctgtctaggtcagcacctaacaatgtggatcacactcatgggaaagtgttttgaggtagtttaaacctttggaagtttgggttttaaacttccctctgtggaagatattcaaaagccacaagtggtgcaaatgtttatggtttttatttttcaatttttattttggttttcttacaaaggttgacattttccataacaggtgtaagagtgttgaaaaaaaagttcaaatttttgggggagcgg

SEQ ID NO: 220 - DNA, 341 bp, Homo sapiens
  misc_feature 86, 87, 88, 188, 189, 190: n = A,T,C or G
aaaacaggcaaagttttacagagaggatacatttaataaaactgcgaggacatcaaagtggtaaatactgtgaaataccttttctnnncaaaaggcaaatattgaagttgtttatcaacttcgctagaaaaaaaaaaacacttggcatacaaaatatttaagtgaaggagaagtctaacgctgaactnnnaatgaagggaaattgtttatgtgttatgaacatccaagtctttcttcttttttaagttgtcaaagaagcttccacaaaattagaaaggacaacagttctgagctgtaatttcgccttaaactctggacactctatatgtagtgcattttta

SEQ ID NO: 221 - DNA, 234 bp, Homo sapiens
ccagggggaattgagggaggctctaagctaggggcactgcatggtgggacaggatggccccttgaggactgaaccctggggagaagacaaacagtaataataaaaacaaataacaagtactttaagaatggattgtatgacctatagtgacagatgacatcactaatactgaaagcttcttatattaataattttggcaaaatgtcattttgtaatatagtatatgctttccag

SEQ ID NO: 222 - DNA, 186 bp, Homo sapiens
aaattttcattgagttgtccatctccagcatatagggcttcaggagcagagcagaccttgtttttagtggttccatgggataaaatgggattggaggagctagaagaattcagggtctggtccaatctgccagtcttcctgaaatatcgaaaatacaccagggctgctatatcagagccaccctgg

SEQ ID NO: 223 - DNA, 486 bp, Homo sapiens
ccataagcagataagtagcagttcaactggatgtctctcttctccaaatgctacagtacaaagccctaagcatgagtggaaaatcgttgcttcagaaaagacttcaaataacacttacttgtgcctggctgtgctggatggtatattctgtgtcatttttcttcatgggagaaacagcccacagagctcaccaacaagtactccaaaactaagtaagagtttaagctttgagatgcaacaagatgagctaatcgaaaagcccatgtctcctatgcagtacgcacgatctggtctgggaacagcagagatgaatggcaaactcatagctgcaggtggctataacagagaggaatgtcttcgaacagtcgaatgctataatccacatacagatcactggtcctttcttgctcccatgagaacaccaagagcccgatttcaaatggctgtactcatgggccagctctatgtggtaggtggatcaaatgg

SEQ ID NO: 224 - DNA, 322 bp, Homo sapiens
aaatgttcactatgtcatttagtgtccaactttacggataggttgactatctaaataggcatttttagtcattaaaaaaaaatctagtcaccaggaggatccctataactcaaaataacttgtttgtaaaagaaaatttgtttacttacccattagtaagttcctgcatattcattataagatggcaaatcaaacttttctaggatgaagacagcttatttttaagttgtatagtcttagttggtttagggtctcaattttaattaataaaatacttggtttttatttgcttgtccttttgaattcctgttttaataatttt

SEQ ID NO: 225 - DNA, 489 bp, Homo sapiens
aaatgtaggaataaaatggctggcatctaagcactttagtaaaagaggtttttacaaataactaaggattgtagagcttccttctctttttttttctttttctttcttttgttttacatgaactcaacttattcctaacatttgtctacctcaaagaaatttcaagattatttagataacatggatatgtgccaaatcctttgagctgttaagatgataatttcctgctttcctcctacatcttctcctcccactccctcctttggtgtgaatattggcttcccaattaagaccttttttttttttttccagtttgttttagcttattataggttttggaggaactttgccattttgtaatctttcaaatcattcttcacccttcctcacatcagcttcctgcttttcccagtgttttactgtaaattgtgtagcatatgacaaatcttgagctgactttcctcttcactgatgtcatcttgagctctt

SEQ ID NO: 226 - DNA, 398 bp, Homo sapiens
caagggcccaccgcagagcacacctatgctatggggagccctgctggcagccccgagagccatgccatggcctgcaggagccaggctcctgtgtggatgaagtccctcttcctctgtgccttgatcccttgggggtgcctttggtcatctcttctgtcctttcctgtctctgaaatagtcatcactccccttgactctctctgttcacgtcttctcagtctgcagagttaacttctgtaaggagtttaatctggggttccaagaaaacaagttccttgttaacatagcactgactttgcaacaatagaaaactaacaaatgagcaacaatataaagagtagaggtagttctcattgggtgtaacttcaacccattctgcttgtggttagaatttataa

SEQ ID NO: 227 - DNA, 535 bp, Homo sapiens
ctgctgcatagaaaatatgctaacatacaacagtcaagtttaagcctgtgcatagagaagataaagcacttatggtaactgcaaatggtaacgagtccttaaggtttgtacaacctagtatgggtccataaggaaaaactgtagtagaaatggttaggacaaacaataaagtagaaacaggggggaaacttgagaagagaagaaagaagcaagaaaaaaagactttcaattgtataaaattcacaaaccagtaaagtataaagacaccatggagaaatggttaactctgccccaaacacccaacagcaaacaaaaccagaatgaataagcctttggcagacaattttagaaatttgaatgttacatttctcaataattcacaaacaatatattatatggtatatttatattaaatattgggaaaccaatgttgtaaatttgatgcttataatgctttagccaatgagagcacaatgatatcaatcaagctaaatgaatgctggtgttatcacaacagtgctcatttatgaaacaa

SEQ ID NO: 228 - DNA, 301 bp, Homo sapiens
aaacaataaacaccatcaaccttattgactttattgtcccttaaattatattgactgttgtgattccatcaagtttgtacactcttttctctccctgttttgcagcaacaaattgcgaagtgcttttgtttgtttgttttcgtttggttaaagcttattgccatgctggtgcggctatggagactgtctggaaggcttggaatggtttattgcttatggtaaaatttgcctgatttcttacaggcagcgtttggaaaccttttattatatagttgtttacatacttataagtctatcattt

SEQ ID NO: 229 - DNA, 420 bp, Homo sapiens
aaagttgctttgctggaagtttttataaggaatctcagattaaacctttagaagtttaattgacactaggaagccaaaccaaggctgacttcagactttgtttgtagtacctgtgggtttattacctatgggtttatatcctcaaatacgacattctagtcaaagtcttggtaatataaccaatgttttcaaatgtattctgtcatacaaagagcagatttttattgaacttgtgcaataactatattaccatacaatataaatattcatgaatagtttcccaagtctggagcgaccacatagggagaaaatgcaaatgtctcaatttttgttcacaaaagtatattttatcaaattgctgtaagctgtggatagcttaaaagaaaaaaagtttcctgaaatctgggaaacaagacattt

SEQ ID NO: 230 - DNA, 419 bp, Homo sapiens
gtgaagtcctaaagcttgcattccaccagcttctacaatagccggcttattactagagcagacagatagcaccttcagcactctgcttgtggtccacagtagtttttcgtaagtataggtcctcattatatttactaaagcttggggtccaccactagccagtatgatgagcttgctttcttggttgccataagctaaaatttgaaggcagtctgtcgtaatagccaagaatttaacatttgttttgttgagcaaggcaaccattttctgcagcccaccagctaaacgcactgccattttagctccttcttgatgtaataaaaggttgtggagagttgtaatggcataaaacaacacagaatccactggtgaaccaagcattttcaccagggcaggaatgcctccagacttaaagatgg

SEQ ID NO: 231 - DNA, 389 bp, Homo sapiens
ttgttcagagccctggtggatcttgcaatccagtgccctacaaaggctagaacactacaggggatgaattcttcaaataggagccgatggatctgtggtcctttgggactcatcaaagccttggtttagcattttgtcagttttatcttcagaaattctctgcgattaagaagataatttattaaaggtggtccttcctacctctgtggtgtgtgtcgcgcacacagcttagaagtgctataaaaaaggaaagagctccaaattgaatcacctttataatttacccatttctatacaacaggcagtggaagcagtttcagagaactttttgcatgcttatggttgatcagttaaaaaagaatgttacagtaacaaataaagtgcagttt

SEQ ID NO: 232 - DNA, 397 bp, Homo sapiens
ccaggataatatacacaggtttgcagctaaaactgtgcacagtgggtcattgatgctagtcacagtggaactgaaggaaggctctacagcccagcttatcataaacactgagaaaactgtgattggctctgttctgctgcgggaactgaagcctgtcctgtctcaggggtaacctgcttacatctggactttagaatctggcacacaacaaaagtgcctggcatccactactgctgcctttcatttataataatagcccttccatctggcagtgggggaagaatacactcttgacattcttgtctcctgctttagaatgctagtgtgtatctatcatgtatgcaatactttccccctttttgctttgctaaccaaagagcatatattttactgtcag

SEQ ID NO: 233 - DNA, 508 bp, Homo sapiens
cgaggagtcgcttaagtgcgaggacctcaaagtgggacaatatatttgtaaagatccaaaaataaatgacgctacgcaagaaccagttaactgtacaaactacacagctcatgtttcctgttttccagcacccaacataacttgtaaggattccagtggcaatgaaacacattttactgggaacgaagttggttttttcaagcccatatcttgccgaaatgtaaatggctattcctacaaagtggcagtcgcattgtctctttttcttggatggttgggagcagatcgattttaccttggataccctgctttgggtttgttaaagttttgcactgtagggttttgtggaattgggagcctaattgatttcattcttatttcaatgcagattgttggaccttcagatggaagtagttacattatagattactatggaaccagacttacaagactgagtattactaatgaaacatttagaaaaacgcaattatatccataaatatttttt

SEQ ID NO: 234 - DNA, 358 bp, Homo sapiens
aaatgttggtattcaaaaccaaagatataaccgaaaggaaaaacagatgagacataaaatgatttgcaagatgggaaatatagtagtttatgaatgtaaattaaattccagttataatagtggctacacactctcactacacacacagaccccacagtcctatatgccacaaacacatttccataacttgaaaatgagtattttgcatatctcagttcaggatatgttttttacaagttaatcctaaagtcataaagcaagaagctattcatagtacaagattttatttgctaagctttacaaattaaactctaaaaaattattacaatgatactgaaagatattttattggcctttt

SEQ ID NO: 235 - DNA, 482 bp, Homo sapiens
gaagaaagttagatttacgccgatgaatatgatagtgaaatggattttggcgtaggtttggtctagggtgtagcctgagaataggggaaatcagtgaatgaagcctcctatgatggcaaatacagctcctattgataggacatagtggaagtgagctacaacgtagtacgtgtcgtgtagtacgatgtctagtgatgagtttgctaatacaatgccagtcaggccacctacggtgaaaagaaagatgaatcctagggctcagagcactgcagcagatcatttcatattgcttccgtggagtgtggcgagtcagctaaatactttgacgccggtggggatagcgatgattatggtagcggaggtgaaatatgctcgtgtgtctacgtctattcctactgtaaatatatggtgtgctcacacgataaaccctaggaagccaattgatatcatagctcagaccatacctatgtatccaaatggtt

SEQ ID NO: 236 - DNA, 149 bp, Homo sapiens
cctcttcattgttcacatgtcacaggaggaggctctgagcaaaggccactggcaagttagggcaacaccaagaaggctctgcggagagactccctgtgggttggggcctggcaggaacggtgcctgtggactgtttatggtctgtccag

SEQ ID NO: 237 - DNA, 391 bp, Homo sapiens
gaagctaaatccaaagaaatatgaaggtggccgtgaattaagtgattttattagctatctacaaagagaagctacaaacccccctgtaattcaagaagaaaaacccaagaagaagaagaaggcacaggaggatctctaaagcagtagccaaacaccactttgtaaaaggactcttccatcagagatgggaaaaccattggggaggactaggacccatatgggaattattacctctcagggccgagaggacagaatggatataatctgaatcctgttaaattttctctaaactgtttcttagctgcactgtttatggaaataccaggaccagtttatgtttgtggttttgggaaaaattatttgtgttgggggaaatgttgtgggggtgggg

SEQ ID NO: 238 - DNA, 374 bp, Homo sapiens
aaaaaacaaaacaatgtaagtaaaggatatttctgaatcttaaaattcatcccatgtgtgatcataaactcataaaaataattttaagatgccggaaaaggatactttgattaaataaaaacactcatggatatgtaaaaactgtcaagattaaaatttaatagtttcatttatttgttattttatttgtaagaaatagtgatgaacaaagatcctttttcatactgatacctggttgtatattatttgatgcaacagttttctgaaatgatatttcaaattgcatcaagaaattaaaatcatctatctgagtagtcaaaatacaagtaaaggagagcaaataaacaacatttggaaaaaaaaaaaaaaaaaaa

SEQ ID NO: 239 - DNA, 200 bp, Homo sapiens
aaagatgtctttgaccgcatatgtactggaaatttcaaacgtggatcttcccaggttgtagtctttgtgttatgatcaatgaagaagggccggccgtttggcgctatcctcatttcccagccgggtggcaagaagctctgtgtgactttgtgttgtggtttgggggagttgtaaggtgatggctgtggggactgtgggtt

SEQ ID NO: 240 - DNA, 314 bp, Homo sapiens
  misc_feature 67, 71, 76, 99, 224: n = A,T,C or G
ctggtaaactgtccaaaacaaggttccaaataacacctcttactgatttaccctacccatacatatnccanatagnttttgatcaaaaacatgaaatanatccacctgcttattttaagcatattaaaaaggaaactaattggaccattttctatttgtctattttatacaaaaaggctacacaattgatacactctattcagataacaatcaattagagtgantatgaattactggcgacaccatcactcaattcttaaaaattagaaattgctgtagcagtattcactataacttaacactaccgagagact

SEQ ID NO: 241 - DNA, 375 bp, Homo sapiens
  misc_feature 302, 316, 328, 329, 333, 340, 343, 354, 355, 362: n = A,T,C or G
ccaagtccttggagttataggatattcattacttcctctcattgtaatagcccctgtacttttggtggttggatcatttgaagtggtgtctacacttataaaactgtttggtgtgttttgggctgcctacagtgctgcttcattgttagtgggtgaagaattcaagaccaaaaagcctcttctgatttatccaatctttttattatacatttatcttttgtcgttatatactggtgtgtgatccaagttatacatgaatagaaaaagatggtgttaaatttgtgtgtaggctgggaattctngctaaaggaatggnaaaaaacctgtnnttgnaaaattnacntgtcccaaagnnaaggaanctaaacgcttttt

SEQ ID NO: 242 - DNA, 387 bp, Homo sapiens
aaaggcattctctgatttacatgagaattgagaaactgagatgtatgatttgtctgttagtcaatttcacaccctttcattctcataagccccaaattttgctcagttaaggagcttgctttaggcccacctatgtaagtctgttatactagctaatgtgcccatttgaatagttcaagggtcagctaatgctctgagcttcatggctccagtataaagaacaaatttaacaaaattaagctgttactgtagccgagttacccttctgctccacacatatgtagtgggatcttgcaggatttccatagtgccaattatcaaaggccttgactacttagcattgctgtattacagatgtgcaaactgaggcactgaaaagtcaaattt

SEQ ID NO: 243 - DNA, 536 bp, Homo sapiens
  misc_feature 30, 344, 510: n = A,T,C or G
aaaccaaaaggacgaagaaaaaacactttnaaaaaaaaaaaaaaaaaagaaaaaccaaaccatattttgccacatgtgagagtacggtcaagcagtatttacaaaaaggttaacggaacaacactctgacacatgctctgagaatactgggactgctgtttcaaaaaaaaaggttcaaacttattgtcacagcatcatcacaaaatagaggatcaccattggtttgcttggcttttctttttttttttcccccaagtgaggacctaactccaaataatacaatagaatatgcaaattatcttcacatcaagagtaccccaagaaaaacgaaatccatggcacanacactgtacaagggtgcagggcagggctctgaggggcccaaaccccattttgccaactcgattttctagcattgaagggagcaaggggtcaggcatatgatggagatgatactgaaatgatttatccaaaatccatgcaaatcaagttctttggatagaggtgaanaacttggacatggctgtttcaggcag

SEQ ID NO: 244 - DNA, 397 bp, Homo sapiens; identical to SEQ ID NO: 232

SEQ ID NO: 245 - DNA, 508 bp, Homo sapiens; identical to SEQ ID NO: 233

SEQ ID NO: 246 - DNA, 358 bp, Homo sapiens; identical to SEQ ID NO: 234

SEQ ID NO: 247 - DNA, 673 bp, Homo sapiens
  misc_feature 605, 618, 635, 644, 651, 660, 668: n = A,T,C or G
gaagaaagttagatttacgccgatgaatatgatagtgaaatggattttggcgtaggtttggtctagggtgtagcctgagaataggggaaatcagtgaatgaagcctcctatgatggcaaatacagctcctattgataggacatagtggaagtgagctacaacgtagtacgtgtcgtgtagtacgatgtctagtgatgagtttgctaatacaatgccagtcaggccacctacggtgaaaagaaagatgaatcctagggctcagagcactgcagcagatcatttcatattgcttccgtggagtgtggcgagtcagctaaatactttgacgccggtggggatagcgatgattatggtagcggaggtgaaatatgctcgtgtgtctacgtctattcctactgtaaatatatggtgtgctcacacgataaaccctaggaagccaattgatatcatagctcagaccatacctatgtatccaaatggttctttttttccggagtagtaagttacaatatgggagattattccgaagcctggtaggataagaatataaacttcagggtgaccgaaaaatcagaataggtgttggtatagaatggggtctcctnctccgcggggtcnaagaaggtggtgttgangttgccggnctgttantagtatagngatgccancagct

SEQ ID NO: 248 - DNA, 149 bp, Homo sapiens; identical to SEQ ID NO: 236

SEQ ID NO: 249 - DNA, 458 bp, Homo sapiens
  misc_feature 450: n = A,T,C or G
gaagctaaatccaaagaaatatgaaggtggccgtgaattaagtgattttattagctatctacaaagagaagctacaaacccccctgtaattcaagaagaaaaacccaagaagaagaagaaggcacaggaggatctctaaagcagtagccaaacaccactttgtaaaaggactcttccatcagagatgggaaaaccattggggaggactaggacccatatgggaattattacctctcagggccgagaggacagaatggatataatctgaatcctgttaaattttctctaaactgtttcttagctgcactgtttatggaaataccaggaccagtttatgtttgtggttttgggaaaaattatttgtgttgggggaaatgttgtgggggtggggttgagttgggggtattttctaattttttttgtacatttggaacagtgacaataaatganaccccttt

SEQ ID NO: 250 - DNA, 374 bp, Homo sapiens; identical to SEQ ID NO: 238

SEQ ID NO: 251 - DNA, 356 bp, Homo sapiens
aaagatcttctctaacaagctatgggaatttggcttcatactctttctttgcaacagcagtgttctgggtgataattttgaattgatacctgttcctttttctgggttttgttggctttttgaaaaattgtctttccttatcattggtgggaggcttggtagcaaagtaacattttttggaaaagaggacagaaaaattgaactacagcttgagaacgtattctttttttcctactttgttattgcaaattgaggaatcacttttaactgttttaggtgtgtgtgtccagagtgagcaaggattatgtttttggattgtcaaagaggatgcttagtcttaaaataaaaataaattt

SEQ ID NO: 252 - DNA, 484 bp, Homo sapiens
ctggtaaactgtccaaaacaaggttccaaataacacctcttactgatttaccctacccatacatatcccaaatagtttttgatcaaaaacatgaaatagatccacctgcttattttaagcatattaaaaaggaaactaattggaccattttctatttgtctattttatacaaaaaggctacacaattgttacactttattcagattacaattaattagagtgattatgaattagtgttctacaccattactcaattcttaaaaattagaaattgctgtagcagtattcactataacttaacactacgagagacttaaaaaacagttactgcaaaaaaaaaaaagagctacttcaaagcaagcaaagtcagtaccattacagatattcttaaaaaaaaaaaaaaatttaacaagcaaggctagggtttgataaattccatcttgtgatccattcttgtgcattcttcacttcttgagtcactccc

SEQ ID NO: 253 - DNA, 379 bp, Homo sapiens
aaaaagcgcttagacttccctttccatctggaacatgtaaaattttgcagcaacaggttttctccaattccttcagcaagaattcccagcctacacacaaatttaacaccatctttttctattcatgtataacttggatcacacaccagtatataacgacaaaagataaatgtataataaaaagattggataaatcagaagaggctttttggtcttgaattcttcacccactaacaatgaagcagcactgtaggcagcccaaaacacaccaaacagttttataagtgtagacaccacttcaaatgatccaaccaccaaaagtacaggggctattacaatgagaggaagtaatgaatatcctataactccaaggacttgg

SEQ ID NO: 254 - DNA, 387 bp, Homo sapiens
  misc_feature 66: n = A,T,C or G
aaatttgacttttcagtgcctcagtttgcacatctgtaatacagcaatgctaagtagtcaaggccnttgataattggcactatggaaatcctgcaagatcccactacatatgtgtggagcagaagggtaactcggctacagtaacagcttaattttgttaaatttgttctttatactggagccatgaagctcagagcattagctgacccttgaactattcaaatgggcacattagctagtataacagacttacataggtgggcctaaagcaagctccttaactgagcaaaatttggggcttatgagaatgaaagggtgtgaaattgactaacagacaaatcatacatctcagtttctcaattctcatgtaaatcagagaatgccttt

SEQ ID NO: 255 - DNA, 225 bp, Homo sapiens
  misc_feature 30: n = A,T,C or G
aaatgtcttgtttcccagatttcaggaaantttttttcttttaagctatccacagcttacagcacctttgataaaatatacttttgtgaacaaaaattgagacatttacattttctccctatgtggtcgctccagacttgggaaactattcatgaatatttatattgtatggtaatatagttattgcacaagttcaataaaaatctgctctttgtatgacagaat

SEQ ID NO: 256 - DNA, 544 bp, Homo sapiens
  misc_feature 31, 445, 518: n = A,T,C or G
ccttgcttaaagcccagaagtggtttaggcntttggaaaatctggttcacatcataaagaacttgatttgaaatgttttctatagaaacaagtgctaagtgtaccgtattatacttgatgttggtcatttctcagtcctatttctcagttctattattttagaacctagtcagttctttaagattataactggtcctacattaaaataatgcttctcgatgtcagattttacctgtttgctgctgagaacatctctgcctaatttaccaaagccagaccttcagttcaacatgcttccttagcttttcatagttgtctgacatttccatgaaaacaaaggaaccaactttgttttaaccaaactttgtttggttacagttttcaggggagcgtttcttccatgacacacagcaacatcccaaagaaataaacaagtgtgacaaanaaaaaaacaaacctaaatgctactgttccaaagagcaacttgatggttttttttaatactgagtgcaaaaggncacccaaattcctatgatgaaatttt

SEQ ID NO: 257 - DNA, 420 bp, Homo sapiens
aaatgtcttgtttcccagatttcaggaaactttttttcttttaagctatccacagcttacagcaatttgataaaatatacttttgtgaacaaaaattgagacatttacattttctccctatgtggtcgctccagacttgggaaactattcatgaatatttatattgtatggtaatatagttattgcacaagttcaataaaaatctgctctttgtatgacagaatacatttgaaaacattggttatattaccaagactttgactagaatgtcgtatttgaggatataaacccataggtaataaacccacaggtactacaaacaaagtctgaagtcagccttggtttggcttcctagtgtcaattaaacttctaaaagtttaatctgagattccttataaaaacttccagcaaagcaacttt

SEQ ID NO: 258 - DNA, 736 bp, Homo sapiens
aaacaaaatgctaaacctaaaaacattgttctgtcagttcccaaattaaatctacttagaacaaaaacaaaaatttatagctcggtcacatactacttaaataatattgttcaggcatctctaaaatcctccatgttttcaagtatggaaatagaactcaaatattccacaatacagtactaaacagatggagtatttaggaaagactttgttgtcatatggcacaatattaatattttgttgcttcaatacgttttgaaataaatatcagatttttgtttttttttcctaaaagaccaaaattataatctacattaagataattctgactgtggttaagacttaagagtgtaaaatacaacatcaatattttatcacaaaagtaaagctggtaacaaattataaaaggagccagtactctactgagacaggctcggagattaaagctcatcatgatagaaatagtcatcatggagctgtctgccataatctgtggcttcactggtgagaaacaagtccgggttttccagaatctcttcttcagagagctttttgtcaccattcaaatccatttcatcaattagatgaagcgcctcctcttgtgcaatgccctgattattaggtctacccaaggtaacagctcttggggatcaagcctgccatcgttatctttgtcataatcattcaccgaatctgtctttctcacaagtatcccattctggatcttcatttgcag

SEQ ID NO: 259 - DNA, 437 bp, Homo sapiens
  misc_feature 32: n = A,T,C or G
aaaaccatactgaaatcatttaccaaataacnaagatcttaatctaaaagatagtgaatacatcatcatcatgaaatctggttttatgtgctctatgaagtacttggagaattgcttttttatttttcttttgctttattaggtcacacaaaacagaatgaattagcagaaaaatgtatgttataaaacagcatttactacttcaatttaattttttttactaacaattgtggacctttttgatgacacttatgtatgtttttaataaattatgtacttattagtacttaatgagcccttcctgcctcaatataaaattactaaacttggagaattacagattttattgtaggccctgatgttagtcactttggagaagctaaaaatttggaaatgatgtaattcccactgtaatagcatagggattttggaagcag

SEQ ID NO: 260 - DNA, 592 bp, Homo sapiens
ttttttttttgaaaaatataaaattttaataaaggctacatctcttaattacaataattattgtaccaagtaattttccttaaatgaactctttataatgcataatttacagtataagtagaacaaaatgtcatgacaaaagtcattgagtacaagacttgtaataaaaaggcataaaatatatttatacataaacccctttcaaaaaacaagggaaagcttgagccctcaatatagggcgacacacggagcgggtgaccgtgcaggtacaggtactgtactgatttaaagtcaagcactagagatagtggattaatactcttttgccgtacactatatacagatgtatagtacaagtaacaatggcaaacagaatgtacagattaacttaacacaaaaacccgaacatcaaaatgaaggtgtgtggaggaaaggtgctgctgggtctccctacaactgttcatttctttgtggggcagggggtagttcctgaatggctgtggtccaatgactaatgtaaaacaaaaacagaaacaaaaaaaacaaggaactgtcatttccacgaaagcacagcggcagtgattctagcagg

SEQ ID NO: 261 - DNA, 450 bp, Homo sapiens
gtggcagggcccagccccgaaccagacaagggacccctcaaggagcttcattctagcatgagaaaattgagaagtaaaccagaaagttacagaatgtctgaaggggacagtgtgggagaatccgtccatgggaaaccttcggtggtgtacagatttttcacaagacttggacagatttatcagtcctggctagacaagtccacaccctacacggctgtgcgatgggtcgtgacactgggcctgagctttgtctacatgattcgagtttacctgctgcagggttggtacattgtgacctatgccttggggatctaccatctaaatcttttcatagcttttctttctcccaaagtggatccttccttaatggaagactcagatgacggtccttcgctacccaccaaacagaacgaggaattccgccccttcattcgaaggctcccagagttt

SEQ ID NO: 262 - DNA, 239 bp, Homo sapiens
  misc_feature 32: n = A,T,C or G
taactttgatgacaaaatctaaaattaaaganttagtcttaaaagcctatagtgacttgtttacttgcataaataatattttcacttagtacaggctattaatataagtaatgagaatttaagtattaactcaaaaaaagatagaggctccaaacttttctaagaaattaatgcattttcaaagtaataatataatcaatctgtaagtcaaaagtaatttcatattcattgccaaattt

SEQ ID NO: 263 - DNA, 376 bp, Homo sapiens
  misc_feature 27, 32, 65, 362: n = A,T,C or G
aaaaaaaaaaaaaaaaaattccttgtngtttnttagaggaaaaaaagaaaaaccccaacttttancactgatactacatattgctctgttaaagaattttctctgccaaaaaaaagaaaaaacaaaaaaacgcttaaagctggagtttgacattctgctttcagatgctgtctttttattagtgagtgatgatggtttgctaataatcaataggtaataattttttgtaatcccatcaagtggctccatatgtttctgctctctcgtgactgtgttaatgtttaactgttgtaccttaaagccgaaatcagtaactatgcatactgtaaccaaggtattgggcttacagagttgtttgttgnataaagaaaatttt

SEQ ID NO: 264 - DNA, 207 bp, Homo sapiens
aaattagcattccacaaatatacaggtaatttaataattattgtgcatgaatacatacacaatgcttatatatacaaattccagtttgttttcatgtgctggcaagggatttgtatacaatcataagctgtgttcatattggtcccattgaatattcacaatacaaaagcacaaaagaaccattgatttacaaaaggaaatctattt

SEQ ID NO: 265 - DNA, 388 bp, Homo sapiens
  misc_feature 1, 31, 65, 68: n = A,T,C or G
naactgcactttatttgttactgtaacattnttttttaactgatcaaccataagcatgcaaaagnccnctgaaactgcttccactgcctgttgtatagaaatgggtaaattataaaggtgattcaatttggagctccttccttttttatagcacttctaagctgtgtgcgcgacacacaccacagaggtaggaaggaccacctttaataaattatcttcttaatcgcagagaatttctgaagataaaactgacaaaatgctaaaccaaggctttgatgagtcccaaaggaccacagatccatcggctcctatttgaagaattcatcccctgtagtgttctagcctttgtagggcactggattacaagatccaccagggctctgaacaa

SEQ ID NO: 266 - DNA, 616 bp, Homo sapiens
  misc_feature 32: n = A,T,C or G
aaatacagagtcaaaagatgatttataaaatntaaaacattttctgcttggccgtatttgaagacaagctgaatacatatctatgttctgaataagtccactatggatatatataggaagagatatacatatatccatccacagatacacacacacatatatatttctgcatgtatatatacataattctttctatagttacaggaaatacttcttctataattctgattttgactcccatcctccaccatttactcatccactcattacctaaatcttggctttctttcctatattgtaaataatccatccaaacttctagccagtactgtcaggagggttcttgctcgagtgagctgttaatactattttccactgacaacttctgcacatcgaggacacagtgtatctgaagactccgctgtatacttccaacaacgggggcatttttctttcgtagtcggcatgacaattactttataggaagactcttcacgaatatcaccaccttctaagttgatgaggaatttccctttaagctcgattacatctgcagtcatctctcgtggttcctgaccagtaaagttgactcagaagccatcattaattcattcaa

SEQ ID NO: 267 - DNA, 341 bp, Homo sapiens
ccattatgtatgtattttcttgaaaaatacttatttcagctacttatttttaatagttacttattcttgttgtattgtcatttgagttttgtatatatttttgatattaaccccttgtcacatgtataatttgcaaatattttctccctttttttagttgtcacattctgttcattgtatcagattctgtgcagcagctttttaatttgaagtgatctgactgacttgttcttccttttgtgtcctgggatatttaggttaaatcaaaaaacttgctgcccagaccaatgttatggggctttcactctattttttggtagtagtagtttaagagttttagg

SEQ ID NO: 268 - DNA, 367 bp, Homo sapiens
  misc_feature 31, 66: n = A,T,C or G
ttgtagattggaatagcaaaagtgaatgctntgaccaaaatttttgccctcctaaataaagacgtntccttctagagagcaaatctatcataaaatgtcaaaactagaagagaataaaatgaaaggaaaaaacctagaaaaatatcctaaaatatcaaatgcagtcatttctaaatataagccataattatagctttacctattgttcttattgttcctatgctgcttctacaatgttacatcaactatacttagctttactctcccaaaatcttggtgatgaagccttctgagtgtgctttccaatgtgccagaaccagaagggcattccaaggcttccccacatttcctccatttacggagacag

SEQ ID NO: 269 - DNA, 270 bp, Homo sapiens
  misc_feature 29, 33, 62, 65, 68, 70, 264: n = A,T,C or G
caaatctctccctcactagacgtaagccntttnctcactctctcaatcttatgcatcatagnaangcngntgaggtggattaaaccaaacccagctacgcaaaatcttagcatactcctcaattacccacataggatgaataatagcagttctaccgtacaaccctaacataaccattcttaatttaactatttatattatcctaactactaccgcatccctactactcaacttaaactccagcaccacgaccctactactatntcgcac

SEQ ID NO: 270 - DNA, 368 bp, Homo sapiens
  misc_feature 32: n = A,T,C or G
ctgaatcatgaataacactatataatagagtntaaggaacacaagcattagatgtgatccttgccccatacccttagattatgtcagactaaagctgacaattctgccaggctctgaacccctagtgcccccaacccaaatcttggaagcaaagaatatgccctgtcatacaactttgtacaagttgtagtaaaacaaagcttaagttttctcatctttctacagcaaatggtcagttatttaataaacactaaaatgctcctaagaatccattttgagtttgtttaccaaacacattgtgcaagaactgactacacaaaaagttcctttgaaatttggtccacaaattcacttaaggttggaaattt

SEQ ID NO: 271 - DNA, 313 bp, Homo sapiens
  misc_feature 67, 68: n = A,T,C or G
aaatttatataaaactctgtacatgttcactttattattgcataaacagcataatcttcaagacaanngtttgcaaacacatgtccaattcaggaaaaaaaatttcacgtttctcgtctggcttttttcttcttttttatttgtttgggagattcccagctagtttcagacttggtctgtgaaggaggcacactattttgcttggtatttgacttggatttatctgtctcttgtagtattggcggcacttgggaagagctcttgtcagaatcactttttgataagattacagatggctcggtagaagtagcag

SEQ ID NO: 272 - DNA, 462 bp, Homo sapiens
  misc_feature 31: n = A,T,C or G
aaaaaacatttattttaataagactattgcnaacacattaaaaaaactaaatagtaatattacaaaatctatatacttgcacatttagtatttgtcaatgtgccagaggttttcttcatgaaatttgacttctttgaagtgaaggcttttttctatcatctcttatagctctgactgaataagtcttaatgctttcttcatgttttctatcaataggggtaaatcccgaggctcatatgtgtacaatctgttagagtatcttccagctatgtcagctctaactgttaaagaagggtctacaaacatgattctaggcacatattgcccatcaggtgataaattcttatcagtggtttcatgcataaggtttagcatgatgaacttattctgagccatttcttgtatttcttcattttgggcaaatactttctttagtgcttgagagtattgacaatcctccag

SEQ ID NO: 273 - DNA, 282 bp, Homo sapiens
  misc_feature 30, 66, 67: n = A,T,C or G
ctgatcaaagcatgggatattttaatagtnttatacataatatttttacatagaaaactttacatnncatttcatattatataattctgcttattctttcaaaaatttatacatccattgggcaaggaatggttttcattaaattaccaatattaaatgcacttaatcattgtgtataggttaaaccaaagtaactattaactaacttttaggcattttaaggaggtaaaacatacattttacacataagtatttgatgcaaatatgcagataaaatttttt

SEQ ID NO: 274 - DNA, 125 bp, Homo sapiens
  misc_feature 30, 33, 63, 68: n = A,T,C or G
cagccctagacctcaactacctaaccaacnttncttaaaataaaatccccactatgcacattnaatcnctccaacatactcggattctaccctagcatcacacaccgcacaatcccctatctagg

SEQ ID NO: 275 - DNA, 528 bp, Homo sapiens
  misc_feature 33, 68, 470: n = A,T,C or G
aaagctgtggaaaagctttattatagatttttntacagaattaaaaaagttcaaacaataataagccnggaaccacaaataattaaaaggaaacacagcaatcccataaacaagcattctggcatctgttagaaattttccctcaaattatgaaatgtagctctccatgctttccaatgattgttataatacccacaaatatctgtgatttcagtggaatactttaacaaaagttttctttttaaggcatgatcctgattcattttttcttcaatatctcagtcatttcaggaactaccttaaataaatctgcaactattccataatctgccacttggaaaattggagcttctgggtctttattaattgccacaattgtcttgctgtctttcatcccagctaaatgttggatggctccagatattccaacagcaatataaagttctggtgctactatttttcccgtctgnccaacttgcatgtcattgggaacaaagccagcatcaacagcagcacgggaagcaccaa

SEQ ID NO: 276 - DNA, 420 bp, Homo sapiens
  misc_feature 30: n = A,T,C or G
aaatgtcttgtttcccagatttcaggaaantttttttcttttaagctatccacagcttacagaaacctgataaaatatacttttgtgaacaaaaattgagacatttacattttctccctatgtggtcgctccagacttgggaaactattcatgaatatttatattgtatggtaatatagttattgcacaagttcaataaaaatctgctctttgtatgacagaatacatttgaaaacattggttatattaccaagactttgactagaatgtcgtatttgaggatataaacccataggtaataaacccacaggtactacaaacaaagtctgaagtcagccttggtttggcttcctagtgtcaattaaacttctaaaagtttaatctgagattccttataaaaacttccagcaaagcaacttt

SEQ ID NO: 277 - DNA, 668 bp, Homo sapiens
  misc_feature 31, 63, 566: n = A,T,C or G
ccagggtggctctgatatagcagccctggtntattttcgatatttcaggaagactggcagatngcaccagaccctgaattcttctagctcctccaatcccattttatcccatggaaccactaaaaacaaggtctgctctgctcctgaagccctatatgctggagatggacaactcaatgaaaatttaaagggaaaaccctcaggcctgaggtgtgtgccactcagagacttcacctaactagagacaggcaaactgcaaaccatggtgagaaattgacgacttcacactatggacagcttttcccaagatgtcaaaacaagactcctcatcatgataaggctcttacccccttttaatttgtccttgcttatgcctgcctctttcgcttggcaggatgatgctgtcattagtatttcacaagaagtagcttcagagggtaacttaacagagtatcagatctatcttgtcaatcccaacgttttacataaaataagagatcctttagtgcacccagtgactgacattagcagcatctttaacacagccgtgtgttcaaatgtacagnggtccttttcagagttggacttctagactcacctgttctcactccctgttttaattcaacccagccatgcaatgccaaataatagaaattgctccctaccag

SEQ ID NO: 278 - DNA, 202 bp, Homo sapiens
  misc_feature 30, 32, 63, 66: n = A,T,C or G
aaattggtatcgacggcaaccaggggaagntnctaaactcctaatctattctggatccaattngcnaagtggggtcccatcaaggttcagtggcagtggatctgggacagatttcactctcacgatcagcagtctgcaacccgaagattttgcaacttactactgtcaacagagttacatgtccccgtacacttttggaccc

SEQ ID NO: 279 - DNA, 694 bp, Homo sapiens
  misc_feature 63, 526, 577, 580, 586, 599, 608, 620, 624, 642, 643, 651,660, 668, 681, 687, 692, 693: n = A,T,C or G
ctgtacttggacaaaataagttaattctatttggttgtccattaaagttttatgtggctatgnacccactggagctaaaaattggcttttaactgtttccaaatcagaactagcagaggagagaagtaaataaagccaatggcactcccttcagaggctcaaaatggttagattttgatgcagatttaaccttagcgagtttcagtcagtccatttagatgatcctgtaggttcatacaaatacactgaaccgttggtttaacttctcttccttcctcaaagtttatgataaagagactcatccctgtattgggagtgactgacataagttcagatctgctcagagtggctggtaaggaacacttaaggtcagtcagaaaataatcaaacagacttctcatgtaagcaccgtgactcacaactaagacactggctgctaatcctggaataccgctgtctgaattaactttagagctgtgattttttcctaaaggaaatatctctgccaaagaagtttccagacagntgcttgggagatccttggggaaaactggtctttttgatccggttctttcangantaggtngacaaaagaaatncaaaaaagnctatcccacgcntttntcacctgggcccagcggnnctcctccnggggggggnaaacacangggactcttcccngggctngcttnng

SEQ ID NO: 280 - DNA, 441 bp, Homo sapiens
aaaaaacttccatgcaacttctggtttattgtttggcaactccacatgataaaaaaataaaaacagcccaaccgagtttcggaattaagtattcttctagtaagtgattcaaacttgtaatatttgccacaggactgacttatttatttactagctagaagctcttaagttcacttgtttatcagggcatatacagaagggtttgttaaaactcgatgttaactttacaactttctgacctggtgcatgaattctcaagtactgtatttcactgtgttggtgtgtctgatggaaatttcgaggtggtcccacaaaaatattttatgtagtgtgccttcaaagagaaccatttatttctcttcacttatcgtcccacaaagtcacatttggtggtggtcagccaagtcgcatctggtctagttttactcttgtcccaatttt

SEQ ID NO: 281 - DNA, 398 bp, Homo sapiens
aaatttgttaggtctgaagaatctaaaactgttaatttaacccttaacttgtgcctagaaactacagcacatataaaatatgtaaacaccagcctgttgctgtacttttctgcttattttacagcctcaaatatttctcattatcttgtcacttagttcttcatgtttctccttctgacttttaataatggtaataggaaaacaaaacccaaagcttttcagaacttcagtgtgaggtttcctattttgacaagttaacttgtaaatactcaggttttacgatgtataatttacctaatagaccaaactaactcatggagatattttgaactattatttaggtacaaactttataaagaatgttagtatgtcataaaatataacattacagcttattt

SEQ ID NO: 282 - DNA, 226 bp, Homo sapiens
  misc_feature 31, 65: n = A,T,C or G
aaaacaatattctctttttgaaaatagtatnaacaggccatgcatataatgtacagtgtattacnccaatatgtaaagattcttcaaggtaacaagggtttgggttttgaaataaacatctggatcttatagaccgttcatacaatggttttagcaagttcatagtaagacaaacaagtcctatctttttttttggctggggtgggggcgcccaggccgaggctgg

SEQ ID NO: 283 - DNA, 358 bp, Homo sapiens
aaacaaaaatactcaagatcatttatatttttttggagagaaaactgtcctaatttagaatttccctcaaatctgagggacttttaagaaatgctaacagatttttctggaggaaatttagacaaaacaatgtcatttagtagaatatttcagtatttaagtggaatttcagtatactgtactatcctttataagtcattaaaataatgtttcatcaaatggttaaatggaccactggtttcttagagaaatgtttttaggcttaattcattcaattgtcaagtacacttagtcttaatacactcaggtttgaacagattattctgaatattaaaatttaatccattcttaatatttt

SEQ ID NO: 284 - DNA, 288 bp, Homo sapiens
aaaacttttgttaagaaaaactgccagtttgtgcttttgaaatgtctgttttgacatcatagtctagtaaaattttgacagtgcatatgtactgttactaaaagctttatatgaaattattaatgtgaagtttttcatttataattcaaggaaggatttcctgaaaacatttcaagggatttatgtctacatatttgtgtgtgtgtgtgtgtatatatatgtaatatgcatacacagatgcatatgtgtatatataatgaaatttatgttgctggtattttgcatttt

SEQ ID NO: 285 - DNA, 629 bp, Homo sapiens
  misc_feature 31, 34, 35, 115, 435, 526, 585: n = A,T,C or G
cctaaaagcagccaccaattaacaaagcgtncannctcaacacccactacctaaaaaatcccaaacatataactgaactcctcacacccaattggaccaatctatcaccctatanaagaactaatgttagtataagtaacatgaaaacattctcctctgcataagcctgcgtcagattaaaacactgaactgacaattaacagcccaatatctacaatcaaccaacaagtcattattaccctcactgtcaacccaacacaggcatgctcataaggaaaggttaaaaaaagtaaaaggaactcggcaaatcttaccccgcctgtttaccaaaaacatcacctctagcatcaccagtattagaggcaccgcctgcccagtgacacatgtttaacggccgcggtaccctaaccgtgcaaaggtagcataatcacttgntccttaattagggacctgtatgaatggcttcacgagggttcagctgtctcttacttttaaccagtgaaattgacctgcccgtgaagaggcnggcatgacacagcaagacgagaagaccctatggagctttaatttattaatgcaaacagnacctaacaaaccccacaggtcctaaacttacccaaaccctggca

SEQ ID NO: 286 - DNA, 485 bp, Homo sapiens
aaatgtacttgctcagctcaactgcatttcagttgtattatagtccagttcttatcaacattaaaacctatagcaatcatttcaaatctattctgcaaattgtataagaataaagttagaattaacaattttattttgtacaacagtggaattttctgtcatggataatgtgcttgagtccctataatctatagacatgtgatagcaaaagaaacaaacaaaagccaggaaaacactcattttcgccttgaatatgtaaatgggattaattttgtcctgtgccttatgtggaaaggaacttctttggttttccttttttgttctggtggaagcatgtgcaggagacatatcatccaaacataaaccattaaaatgtttgtggtttgcttggctgtaattttcaaagtagttaattgaggacaaagggtaatgcagaagtgatagctttggtttgctgagtcttgttttaagtggccttgatattt

SEQ ID NO: 287 - DNA, 340 bp, Homo sapiens
cctggagtccaataaccaccccctcataccacaccctgtgcatacaccagccaagcctttcctggtctgggaagggaagagaaaaaagacgcaggccacctgggggttctgcagtctttggtcagtccagccttctatcttagctgcctttggcttccgcagtgtaaaccttgcctgcccggaggcaggaggcccagctggacctccgagggccatgagcaggcagcagccatcttggcctcaagcttgcctttcccttgagtccctctctcccctcggctctagccagaggtgtagcctgcagatctaggaagagaagagctggggaggaggatgaagg

SEQ ID NO: 288 - DNA, 290 bp, Homo sapiens
aaacagtctctcctcggtgttctccttgtcaaactgttcatcccagtttcctctgaaatagacagcattcaccagaaccagccttgtcaatggatccactgagcccggagagagcaactccgcaattttaccttctgtcttttcagctacccaggtgtttatgtgttttctggacttctctacggcgctgataaagtcaagctcctccatctctgcttggtagaatttttggcaggaatctctaaaagatgagaggaaatcacaagacttttccccaaagagcctgttgg

SEQ ID NO: 289 - DNA, 404 bp, Homo sapiens
ccacccacgcttaggttcccatcacactgatgactccgggtttggcgagcacaggagcgcaaaccttttcacattctttctgtgatccaaatttgttttcgtttccaccacaacctccataccagaatcttgcacagcttttggtgtttggatcatagtaccattttaatatgaaatccctgcaagttccttcgtctttcggcaacttgcatatatctgtttcagtgagagccaatggttctgtgctcaccattagattgatggttgaactagaagctgaccttgctggctgtggaggtgggggctgagatttctttgtactgaaacttccgtggtaggtggctctgacctgagacctcaggtagcagaccacagccacatggtatgtctgcccagcgagcagg

SEQ ID NO: 290 - DNA, 384 bp, Homo sapiens
  misc_feature 305: n = A,T,C or G
ccaggcgctccttgtcggcatcagggagggtggccttgaactgctcatgggctgtggtcagtccctggatctcctcaatggtgtgcacaatgaaggtgtcctgcaggtcctccatggccccctccatccagttgttgaagggtgcagcccgcttggcatactccaagtacagctggtcaatggtctccagcagtttctcggtccgctccagagcttcccttcgcttctgagttagggcccccagattgtcccactggtcacagatcttttggcaacgggcgttgacactgggtgagtcataatantccagctcattgagctcctgtgcgatggcggcaatctgctccacacggtcctggtgggcagccaggccactctcgaagg

SEQ ID NO: 291 - DNA, 278 bp, Homo sapiens
aaagtttatttttactatttctttatcactttattgtatcatcaccattggtttcataatgtaaatactatatgttgaacaaattaaatgtcaaaattttttattaccatagtccatgttaatagtggggctttcaggtgtttagagattttttttgttgttgttaacattcattgcaaaagtactagatggtgtataactctagagttgaattttaagggattccctaatatgtatactatctttttatctgaagtaataaataaacaatgatcttg

SEQ ID NO: 292 - DNA, 177 bp, Homo sapiens
ccttggcccggtcattcttgtccagtttgataggttcaggaaattcgttgtacagctccacctccgtttcctgcttaagtgcattccgtgcaatcgtctggaacgcctgctccacgttgatggcctccttggcactggtctcaaagtagggaatgttgtttttgctgtagcaccagg

SEQ ID NO: 293 - DNA, 403 bp, Homo sapiens
aaaaagaaggacttagggtgtcgttttcacatatgacaatgttgcatttatgatgcagtttcaagtaccaaaacgttgaattgatgatgcagttttcatatatcgagatgttcgctcgtgcagtactgttggttaaatgacaatttatgtggattttgcatgtaatacacagtgagacacagtaattttatctaaattacagtgcagtttagttaatctattaatactgactcagtgtctgcctttaaatataaatgatatgttgaaaacttaaggaagcaaatgctacatatatgcaatataaaatagtaatgtgatgctgatgctgttaaccaaagggcagaataaataagcaaaatgccaaaaggggtcttaattgaaatgaaaatttaattttgttttt

SEQ ID NO: 294 - DNA, 305 bp, Homo sapiens
  misc_feature 231, 236, 237, 242, 253, 265, 273, 299: n = A,T,C or G
aaagcaatctggcatggtgtcctgtagtgaagcagaggatcataacataagtaaactctctatgggtggaagttggagagaaggacattttggctttgtacatgaaaagactctccagatagaaacagattctgcccataagtgaaataaaatgctttgtgggggtaatgagtgacttatagtattcaggcagatgttacataactgctaattaagtttccctggattgantttanncaaanaattgaaagtngattttggtcangtgtcagnaaactactgcctataaacccatatcntaccca

SEQ ID NO: 295 - DNA, 397 bp, Homo sapiens
  misc_feature 304, 315, 356: n = A,T,C or G
cctatctggttggcctttttgaagacaccaacctgtgtgctatccatgccaaacgtgtaacaattatgccaaaagacatccagctagcacgccgcatacgtggagaacgtgcttaagaatccactatgatgggaaacatttcattcccaaaaaaaaaaaaaaaaaaaaatttctcttcttcctgttattggtagttctgaacgttagatattttttttccatggggtcaaaaggtacctaagtatatgattgccgagtggaaaaataggggacagaaatcaggtattggcagtttttccatttncatttgtgggngaatttttaatataaatgcggagacgtaaagcattaatgcnagttaaaatgtttcagtgaacaagtttcagcggttcaactt

SEQ ID NO: 296 - DNA, 447 bp, Homo sapiens
ccatcctcgatgttgaagttgtcgtggggcccgaagacgttggtggggatgacagcggtgaaggtgcagccgtactgctggaagtaggccctgttctgcacgtcgatcatcctcttggcatacgagtacccaaaattgctgttgtggggaggcccattgtggatcatggtctcatctatcgggtaggtcgtcttgtcagggaagatacaggtggacaggcaggacaccaccttgcgggcgcccacctcgaaggccgagtgcaggacgttgtcgttcatgtgcacgtttttcctccagaagtccaaattgtatttgatattccggaacaggccccccaccattgcagcaagatggatgacgtgtgtgagttggaccttctcaaacagggcgcgggtctgtgctgtatccgtgagatcggcgtctttagaggagacaaacacccagtcc

SEQ ID NO: 297 - DNA, 681 bp, Homo sapiens
  misc_feature 426, 432, 634, 668: n = A,T,C or G
aaataacagcatgtaaaatattaaaatacaagctttcaaaaataaatacataaataagtagaaccctcgtaagaaatagtcaaacacattaagtcctttccagctgtccctagaaagctgctgttctctttttcattttcagctctggtaagggcagggaccaccctgcaggaagtgtcaatgatacgctgataagcttcttacttctctcctgtcagttggtgctccccctgtgatgagaaaagggttactgttgcaggtgctaaggaaggctgctcttctgtcactctgaagttgcttggagggatgtccccatgcagactctctcccagccctccactcagggaaggtctgtctgtacccactgccttctatagcagaaaacttgcactcctgaatgctttttttttttttcaagaaagaagnggctgnggactcaactagattcttggtttgaaaaagccaaaacatattggtcactgattgtcacattgggttagaaatgtccattcatgatctcccttaagctgcacacaaccctatgaaataactaccattatctaccctattttgctaaagctcaaagagattaaataatgttgacagggatcttagccttgaactcactgaaggngttactgcaaagttctgctcttcaccaagaaggnttacaggccaaag

SEQ ID NO: 298 - DNA, 353 bp, Homo sapiens
  misc_feature 68, 72, 169, 182, 262, 263, 264, 269, 275, 335, 343: n = A,T,C or G
cctggcttaagaccagacatttgaagaaggctccaggcagggaaaggaaaggagaggccagccccacnctgncccctccctgcccccacgtctccagcaacacaaggcggccagtggaccgtgaaccatttatttccaaactataaagaaacctgctctctgagaaaanacactgcccaggngatgaagctccagcccctggaggtccaaaacccagtccaaactcagtccctttagaaagctgctgtgccttggaaatgannntcggntgtcanagcctgggaagtggtgggaagaaccagcccactcccctctcctgctgcgattccagcgcncgttgggnccagatctgg

SEQ ID NO: 299 - DNA, 560 bp, Homo sapiens
aaagttcaaggactaaccttatttatttgggaaaggggaggaggaaggaaatgatatggtacccagacactgggctaggctgcaactttatctcatttaatactcccagctgtcatgtgagaaagaaagcaggctaggcatgtgaaatcactttcatggattattaatggatttaagagggcatcaatcagctcaactcaagatttcataatcatttttagtatttagattgtgcctcaaagttgtagtacctcacaatacctccactggtttcctgttgtaaaaaccttcagtgagtttgaccattgtgctcttggctcttgggctggagtaccgtggtgagggagtaaacactagaagtctttagtacaaaactgctctagggacacctggtgattcctacacaagtgatgtttatatttctcataaagagtcttccctatcccaaggtcttcatgatgccagtagccatatatgataaattatgttcagtgataacttagttatcagaaatcagctcagtggtcttccccgccatgattcacatttgatgagttttt

SEQ ID NO: 300 - DNA, 165 bp, Homo sapiens
  misc_feature 120: n = A,T,C or G
aaaaactacataggggtgtgtgtgtgtgtgtatgtttattttatacacacatatttgtatattctaatatattactaaggcaattttaatgaattaccatgtatataaaaaaatatctgncacttggcacacaggtttgtatgtatgtgtatatatatatgtatg

SEQ ID NO: 301 - DNA, 438 bp, Homo sapiens
aaaatatatgtatttaaaaacaaaaagcaacagtaatctatgtgtttctgtaacaaattgggatctgtcttggcattaaaccacatcatggaccaaatgtgccatactaatgatgagcatttagcacaatttgagactgaaatttagtacactatgttctaggtcagtctaacagtttgcctgctgtatttatagtaaccattttcctttggactgttcaagcaaaaaaggtaactaactgcttcatctccttttgcgcttatttggaaattttagttatagtgtttaactggcatggattaatagagttggagttttatttttaagaaaaattcacaagctaacttccactaatccattatcctttattttattgaaatgtataattaacttaactgaagaaaaggttcttcttgggagtatgttgtcataacattt

SEQ ID NO: 302 - DNA, 172 bp, Homo sapiens
ccaaaacaggagtcctgggtgatatcatcatgagacccagctgtgctcctggatggttttaccacaagtccaattgctatggttacttcaggaagctgaggaactggtctgatgccgagctcgagtgtcagtcttacggaaacggagcccacctggcatctatcctgagttt

SEQ ID NO: 303 - DNA, 552 bp, Homo sapiens
ccagcctgttgcaggctgcttcgtagcgggcgtcggctgcggacttcccttcccgggtctggatcttttcatcctaccagatgagaaagggaatgagtgaatggagtgaccccgcaccctgtcactttcctgagacatgactgccaggaagaagagctgctctggtctccatcagggctggcaggacaaactgaccagtgagtcagtaggcagagttcacactgaaaaagggcacaagggctgtcccacaatgggaggaaatggggtctcagaacttctacttctctgaaaactaagacacaattgggacaaccaccacccccgtgtgagatttctcacctcgagacaggacaagatgaagttcacggcttcttctggggtaaagaccttgaagagcccatcacaggccaacaaaatgaacctacaacaccagggagaaatataaacgggttttaggcccaaccaaaaaataaaaaataaaaaaagggcctggagatggagataaaataaatatttgtccaactattcaaaggctaaggtttttttttcttt

SEQ ID NO: 304 - DNA, 601 bp, Homo sapiens
cctttgattcttggtagtacattgcatgtaaaatgtttataagaagctacttttccttcatgggaagaaattcccacatgagattcataaattcttagactccgtggcttctttggtccggaatgcttaaactcatatgagtgttctggatcccagtgtatccaatcataattcacattatcaccttcacgaaccacatactttgcccacggtgaaatacgatacaagatctctccgcttttactagtaataactacctttaatttggatccatgaggcacgagtacagatttattctgctttggtgggatatacagctcccattttccataatccagttttttgtatgggtacgaaaatggattccaaccattaaaatctccagtaagaaaaactccttctgctcccggggcccattctttgcagtataaaccaccatcagcacatctgtggacgccaaatgattcatagcctctggaaaacttatcaataccaccttcattttctccaatgttcttcaaaatttggctaaactgcttatacctgcgctggaagtccacggcgtagggcttcaagtaccggtcgatctccaggagtctgg

SEQ ID NO: 305 - DNA, 401 bp, Homo sapiens
aaataacagcatgtaaaatattaaaatacaagctttcaaaaataaatacataaataagtagaaccctcgtaagaaatagtcaaacacattaagtcctttccagctgtccctagaaagctgctgttctctttttcattttcagctctggtaagggcagggaccaccctgcaggaagtgtcaatgatacgctgataagcttcttacttctctcctgtcagttggtgctccccctgtgatgagaaaagggttactgttgcaggtgctaaggaaggctgctcttctgtcactctgaagttgcttggagggatgtccccatgcagactctctcccagccctccactcagggaaggtctgtctgtacccactgccttctatagcagaaaacttgcactcctgaatgc

SEQ ID NO: 306 - DNA, 313 bp, Homo sapiens
aaactgactatggattccttgaaggtctggcagttgttgatgatggcgatcatgtactgaacgtagcagtgagggtgctgccgattcctcaggtgctcttctttatacagctgcgcttcatctttatatctgaggacagacaggcttcggtcagacagcactaagggcaacatggagctgtttcaaatgccacgctgacgtcacgcctggcctgaaatttcacatcactaacatctgaccggatgagcctctaaaaataaaacaatctttagacgatccagactaatggaaggacagagaggttgattacttt

SEQ ID NO: 307 - DNA, 366 bp, Homo sapiens
  misc_feature 11, 219, 232, 313, 321, 327, 342: n = A,T,C or G
aaagatgctgntaatgaacattacggacaattcatggtgtggctagttggtaacacttcagctgatttttcttatgagatggaaaaaaaaaatcagccaagtaagggcacatcttcacttcatttataagtcagcatccaaggtaaaagaattctctgttggacttgacatcactcccatcctctgatactcgcctactctcttctcaaagaagttagntctttccttccantgaaatattctcataaaagtcaaatgggttctctactctgaaaaccttgctaaaacccaattccagcataagtttgtctgncacaaacncaatgnattgcttcattaaantgcaattcatcccaatgagcttcc

SEQ ID NO: 308 - DNA, 534 bp, Homo sapiens
  misc_feature 486, 529: n = A,T,C or G
ccagctatcagctgatcgtcttctgtctggacgctcgtcctgcttctgacatcaaaatcttctgtctcaaagtcagagtcatccaactcctcaggggtccttatcatcagcactgctttcctgatgtcccggatgccatcatataccaggcgggaagcatcgataaactcattctcatccatgggctgggcagggtccgagctgagggcttccacggctgcttctacttgctcagtaaaacgtggcatgactgtgttggagagcagcttagtggcttccagaaccttctctgtgtagactcctggctcatagtcgtccatctctgaggtgactacgtgaatgacccgggctgcccggcctcgaattgcaccagctgtgcggccaggccatccacatccttctcttggagagcaatgacacatttggtcacatcttccaaaatgtgattctctgagacagccaagaagtcatcaatggaagtaatgncatcgacagcatctgtgagaacaccgacttgtttttccattgntcttt

SEQ ID NO: 309 - DNA, 164 bp, Homo sapiens
catactccttacactattcctcatcacccaactaaaaatattaaacacaaactaccacctacctccctcaccaaagcccataaaaataaaaaattataacaaaccctgagaaccaaaatgaacgaaaatctgttcgcttcattcattgcccccacaatcctagg

SEQ ID NO: 310 - DNA, 131 bp, Homo sapiens
aaaaatcatttatctttcggtgcttcaacatgatgccaaacaaaaatctactgaataaaaatagcaaggaagggaatcaaacatttataagatatatttattatttttctgaccaaagtgcaatgattttt

SEQ ID NO: 311 - DNA, 626 bp, Homo sapiens
cctatgtgcgccagtttcaggtcatcgacaaccagaacctcctcttcgagctctcctacaagctggaggcaaacagtcagtgagagtggaggctccagtcagacccgccagatccttgggcacctggcactcaagcactttgcacgatgtctcaaccaacatctgacatctttcccgtggagcaacttcctgctccacgggaaagaggtcgatggatttacccctggacccataagtctgttcatcctgctgaagtcccctccccattgctccttcaagccaaaactacactttgctggttcctgtcccctctgagaaaggggatagaaagctccttcctctatgtcctcccatcgagatctgttctggggatggagcttccaacttcctcttgcagcaggaaagaatgctgctcacccttctgtcttgcagagtgggattgtgggagggattggcagccttcttctccaccacctgtccagcttcctcctggtcagggctgggacccccaggaatattatgttgccgtgtgtgtgtgtgtgtgtgtgtgtcttcttttagggagcaggagtgcatctggtaattgagggtagatgttgtgtgtgctggggaggggtccttctgtt

SEQ ID NO: 312 - DNA, 616 bp, Homo sapiens
aaaccaaagaaattaagaaaaaagacttcattgcttgaatgacgcgaacagctgtctgagtcacctagactttaacaccacctggggccctgggaatgacgctgacgagagatctgcacatagtaggcgtgggctccaaatgtgctcatcagctgacttcacatcctcacaagtcagcctcagatatgacccaagggatacgtaccatctcttcttgaaacagcgtgtcaaattatatatatgtatgcaaaaaagagtaatgtactaagcaaaccaagtttcgtctttttcttctgaatctggttttaatgtgacctgtcatccccatctttcgaatttatgagctccatcttctctagactgttaacttcttgaggaaaacatgctattttaccacctttcactgctgaatccctagcccttaagcacagtctctggcacagaataaatacgaaatgaatgagtgaatgaatggatggatgggtgaagagaaaaggcaatgcacaagatttacctatcaaaatccaccaatggtccttaaaaatggttttgtcagtagagatgctgaatatattcatataatacatttatttcaatactattaagaattctagtg

SEQ ID NO: 313 - DNA, 553 bp, Homo sapiens
aaaaaatggcagcattgtacttgaatcagaaagcttactgggatttcctcatcgaaagtagagattgcagctaatcctagtaccttttgttagtaattacttaaggcacagtgcaaagttgaaggactgttttggtacaaactcaagccagctacatgtatgcttgccttggtatccttgctagagcacatgcgggtataataccgtattatacacaacaaggccaccctgttgtatctgtgttacaattaaacatcagtcccagaaagtgaaccctagtcatttattataggtgcccacctctgacttggaacaaaatgccactccattcatgttcatttttgtcctggagaggatttatttcctaaaagattctgaaagccaacaaatcaatgtagttcttcatagagaacttaagagtaaggctcaaaatggcctcaaaatgggcttcttggatgacttccaacagtgactggccttctcaacactgcagatgtctgagcactaccataacctaacgaagtgaggaaggaggaggcaaattggtattttt

SEQ ID NO: 314 - DNA, 330 bp, Homo sapiens
ccagcgactccagcggtggcagcaggcagtgcacgtactctgggcctcccaccagggtagtgaaggttcccagctgttctgccagggccaggaggacctcatcttcatcatagatggtatctgtaaggaaaggcagaagctcacttcgggtcctttcaaccccaagggccaaggcgatggtggacagcttcttgatgctgttgaggcgaagctgaacgtcctcattgcggagttcgtctatgagcaccgcgatggggtacagcgagtcgtcgccgtcggccgccgccatcttggctccgtccctttcctgtcagactgcggccagcgctg

SEQ ID NO: 315 - DNA, 380 bp, Homo sapiens
aaaaatgacattgcgtttagcttattgtaagaggttgaacttttgtattttgtaactatctttaagcccttcagtttataattcatataaaatgccttttgtatttaaaataatcctattttaatcagtgcatgaaatttgcttttttaaagttcatttgaatgattattccttccctctaaagaaatgattttggtaatgttgagaggtaccttaccacaaatcctaactgtaagtgtattcatggttattttcaaaagaattatgactcttccccaaaagaatcctaaaaaacttgtaataaacctataaagctgatttgcatatttacaaaattttgaatagcaaatataggcaactcatatatgtatataattttt

SEQ ID NO: 316 - DNA, 222 bp, Homo sapiens
aaactacagagggttttccagctattatttcctttagtttctaaaagtaacgacttatattaatgttttataaaagatagtgatgaaaaaaaggtaatgctgaaataaaggcgcttttagaaatatttaaggacaacataaggtattaatattggaaaaaaactgtacatattttcaagcacaacactgaaatattgcagcagtgtttaactgaattgtttt

SEQ ID NO: 317 - DNA, 490 bp, Homo sapiens
ccttgaatgagcgtggagagcgattaggccgagcagaggagaagacagaagacctgaagaacagcgcccagcagtttgcagaaactgcgcacaagcttgccatgaagcacaaatgttgagaaactgcctatcctggtgactcttcttaagagaaactgaagagtttgttcagcagtttttacaagaattcgggacctccgcttgcttctttttttccaatatttggacacttagagtggtttttgttttttcttttcagatgttaatgtgaaagaaagggtgttgcatttttacatttccctaatgatcttgctaataaatgctacaatagcatcggcttcattttgggtttttgcctcctcccactgtgtgtatgtgtgtatatgtatgttttgaatatgttttctttattaaaaaatattttttgtagtttgaatatgaaatttggaccaaatgataaactgcgctgagtctaaactggcaacatgta

SEQ ID NO: 318 - DNA, 340 bp, Homo sapiens
cctggagtccaataaccaccccctcataccacaccctgtgcatacaccagccaagcctttcctggtctgggaagggaagagaaaaaagacgcaggccacctgggggttctgcagtctttggtcagtccagctttctatcttagctgcctttggcttccgcagtgtaaaccttgcctgcccggaggcaggaggcccagctggacctccgagggccatgagcaggcagcagccatcttggcctcaagcttgcctttcccttgagtccctctctcccctcggctctagccagaggtgtagcctgcagatctaggaagagaagagctggggaggaggatgaagg

SEQ ID NO: 319 - DNA, 373 bp, Homo sapiens
aaagatgctgttaatgaacattacggacaattcatggtgtggctagttggtaacacttcagctgatttttcttatgagatggaaaaaaaaatcagccaagtaagggcacatcttcagttcatttagaagtcagcatccaaggtaaaagaattctctgttggacttgacatcactcccatcctctgatactcgcctactctcttctcaaagaagttagtctttccttccagtgaaatattctccataaagtcaaatgggttctctactctgaaaaccttgctaaaacccagttccagcataagtctgtctgccacaaactcaatgtattgcttcattagagtgcaattcatgccaatgagcttcacaggcaagg

SEQ ID NO: 320 - DNA, 509 bp, Homo sapiens
aaaaacaaaattaaattttcatttcaattaagaccccttttggcattttgcttacttattctgccctttggttaacagcatcagcatcacattactattttatattgcatatatgtagcatttgcttccttaagttttcaacatatcatttatatttaaaggcagacactgagtcagtattaatagattaactaaactgcactgtaatttagataaaattactgtgtctcactgtgtattacatgcaaaatccacataaattgtcatttaaccaacagtactgcacgagcgaacatctcgatatatgaaaactgcatcatcaattcaacgttttggtacttgaaactgcatcataaatgcaacattgtcatatgtgaaaacgacaccctaagtccttctttttaaaaatgacattgcgtttagcttattgtaagaggttgaacttttgtattttgtaactatctttaagctcttcagtttataattcatataaaatgccttttgtattt

SEQ ID NO: 321 - DNA, 617 bp, Homo sapiens
ccaaggccccttttgcagcccacggctatggtgccttcctgactctcagtatcctcgaccgatactacacaccgactatctcacgtgagagggcagtggaactccttaggaaatgtctggaggagctccagaaacgcttcatcctgaatctgccaaccttcagtgttcgaatcattgacaaaaatggcatccatgacctggataacatttccttccccaaacagggctcctaacatcatgtcctccctcccacttgccagggaacttttttttgatgggctcctttatttttttctactcttttcaggcgcactcttgataaatggttaattcagaataaaggtgactatggatataattgagccctctggtccaggtctcagtttacctaatattacctcagaaaggatatggagggaagatgatctttttgccaggtctgacttttcttcctgctccgccctccattaacgctcagtaccctttagcagctgacggccccacgttctactccatgcttggcttcctttccaactagctctttcatatattttacttgctagtatctccattctctctaaagtagtggttctttttgcccttaaacttaaattttt

SEQ ID NO: 322 - DNA, 403 bp, Homo sapiens; identical to SEQ ID NO: 293

SEQ ID NO: 323 - DNA, 298 bp, Homo sapiens
ccagaattagggaatcagaatcaaaccagtgtaaggcagtgctggctgccattgcctggtcacattgaaattggtggcttcattctagatgtagcttgtgcagatgtagcaggaaaataggaaaacctaccatctcagtgagcaccagctgcctcccaaaggaggggcagccgtgcttatatttttatggttacaatggcacaaaattattatcaacctaactaaaacattccttttctcttttttcctgaattatcatggagttttctaattctctcttttggaatgtagatttttt

SEQ ID NO: 324 - DNA, 78 bp, Homo sapiens
ccatgggaaggtttaccagtagaatccttgctaggttgatgtgggccatacattcctttaataaaccattgtgtacat

SEQ ID NO: 325 - DNA, 174 bp, Homo sapiens
ccatcatggtcaggaactccgggaagtcaatggtcccgttcccatctgcatccacctcattgatcatatcctgcagctctgcttcagtggggttctgtcccagggatctcatcactgtccccaactccttggtggtgatagtgccatctccatccttgtcaaagagggagaagg

SEQ ID NO: 326 - DNA, 679 bp, Homo sapiens
  misc_feature 83, 606: n = A,T,C or G
aaaactgaaatacctcttaaaataatttgatccccagcgtttgctctttttgaagtaaccaacttactcttaaaaaggatggntgccaagatggaaagtcttactgggttttcatgttaacctattctttggacataactatgaattttgtatacaatgcacttcatgaaaagttgtggctcccccagattgcccacaagtgtgatcttgaagtcctaaacatttgtccatgtaagcttcaaaacagcgttaactgagttattcaagtagcagtacttaaagatacaattcttgaagcagtttcaatggtttctgatccaaataatcagtttctgaacattactacttcacataatagagtccatcttcagtttcttctcactttctctttcccttttgggtttcctttttgtggcctgaggccaccagttctttgggtactatcaagatacttccatcatgggtacactggagagcatagtggttgggattgactggcctaccttggtcatctcttaatctactaaaaatatcatgataaaggtcatgcagtttctgtttcattatgttaatagctttggtacattgtgcttgctctctcttaanagtttccttctttgcttgcaagttacatacatcatcttctaaattcaaaattatgtccattttggcgtttacc

SEQ ID NO: 327 - DNA, 619 bp, Homo sapiens
  misc_feature 137, 490, 493: n = A,T,C or G
aaaataagttactggtaaatggagttgcattctatagtcacttaataaatattaacaaaatatttataactggaaccttaatgaaatgtatcatcaaatcaggtaaaagcaacttgtccgcagttaccaaagcctanatacgcgttagatgcgccttttccggcctgtgcgtctgctctggttcctctcaggcagcaaagctggggaaggaagctcaggcaggagcctccccgacgccacaacggcacaagcagcagctaaagcaccgcactttgctctactaaccttttacttaaatgaggttttgccaaatccacatctggaaccgcgtcacacccatttgcaaggatgtttgttctttgatgaaactgcatctctactgcacatgagggctttcattgtaggacaagaggagagttcgtttatttttgtaactgttttacatgttccgattagttaatcggtagcttatgtcatttgctatgcctgnagncttctaatctctccttactaaaacattacttcaaatttgaattgacccttggttataatttatttagccgggatttgtgtgtcattgtagagcaactctaattcaagaatagtgacaacttttaag

SEQ ID NO: 328 - DNA, 132 bp, Homo sapiens
aaatccaaatacaaaagcatagtctctgcaagattttgttctttgaatttcttgatattgtaattgattattgataactgtcatcatgaaattatctctcaataataagataaataaactagcatatgaatc

SEQ ID NO: 329 - DNA, 854 bp, Homo sapiens
  misc_feature 801, 840, 841, 849: n = A,T,C or G
ccttgaggtaactattgcaaaatatacagtgtaagttcagtctgatggaaaccccagattcatcaaggatacaaatctacagtagcccaatggcggtttcatagtgtataatttattatcaataaaattaactccgttacaatcagcattcatttcctccaattaaaattaagcataaaccctaggtagtaaccttctgcacatatgtatagctccgaatttcctcactgttcgtctggtgcaaaaacaatattcaagcttgtctgattatgcatattttctttaatcatatagattatatatacaatagacaagacaggactatatagataatggacagacttaaatgcccgcatttttaaggtggagaaaatgatgaatctatgcatccccgagaacacttaaaatttttttttatttcactgggaaattcttacagctactttacaatcataggttaacagcctagttatacagaagacatattccactacagagctatactctatgcaactgttttttcccctcataaacaacctgagttcaaattgaattctatcttccacaatcacaatgggtgcatcacccagtacacagaagtttgaatcacaaaacataattaccacaataaaacacagtgttcaagtatcttggcagagcaatctgccgcacaaactgcaaattaaattaactacacagactaaaaactatacagcctaccatcacagttgtgcattataaaaaagggagtttctttcctttggttttaagtcaggaacagggtaggattttttaccctcnggccggggaccacgctaaaggggcgaaatttcttgccannatattccnttcac

SEQ ID NO: 330 - DNA, 299 bp, Homo sapiens
ccaatgaataactgactttataatcctgggcaatcagcttttggcgggttgtaagtgcttctcgacacttttcactcatggattcttcaaatttatggttaaagaggcacttatacactctgccctcaccagcttgtgtattttcacaaaaacgctcccgatcatctcggcaagcaaaatataaatgccggtctaagtgaaagtcatccgatgacagctcagccacccggagaatggctttcttgcagagttcagaaacttgaatcttgggttctctttcttctgcttctttcaccagg

SEQ ID NO: 331 - DNA, 573 bp, Homo sapiens
aaagatatgaacagcttaattttccgtgtgattatctaattaaaaaagaaaaacaaaacaagcaaaatgttcaagttaaaaaaaaaacataccgggtgagcaatgcactaaaattatccacatgaaaacaaatggtctgtaatcttataaaccaacatagcatttcactgtcaacaatgtgaaaatttaatatcttctcaaacaggcataagatgaagaagtgctattttttaattgtaaaaggaacttatgtaatgtaaaattacattataatttttcattccgaattgacaaatgatttcaaaaacaaggatcaaagtttgactgcaaatagtaatgcaatataatttcataaaaatccttcaatttctatttttttccttttctgtagttgacatatgaagaccacttcaatttctaaaaaagggaaccattccaattttccctccccaagaaaatgtctcacaattacaaagtagaaaaacagccgttcataaatgcaaaaaaattctgatttatatatgaaataatttctagatcaattcaacatatttgatgacatttgttgagttt

SEQ ID NO: 332 - DNA, 555 bp, Homo sapiens
aaatttgaaagttgtaagcactgatgttaatgtgattgatcagcatgggcatatgtaaaatgtccttttctggttgcctctctatgctattgtgttcagatacttacaccataattaaacagtaagttatagacttgctgagtttggcatagatagtgcgctcatttaatctgtgcctctcaaaacttcagaatattagcatattaccacaaataatttttggtgaaactattgagatattaaaatttttgaaatcactactgttacctgttatagaaaatagtgttggcttagtctagtctctgtgtaactggttacattttgatggttgtctatactcaactggatatgtgtatgtaaattagaaaatacatacctatccagacataaatgctaagtaacatttttttcttcctccaactacataatttgtagctcatcatttttccttaatcctttcctaacttgtcgcagcagtttgaatttcccagatatttatgtttgaacataatggctcagaatacatatttgaacatcatagttgtatatattttt

SEQ ID NO: 333 - DNA, 460 bp, Homo sapiens
aaatttctttcaacagtctattggggtccaaaaagcatatatcaaaacaaaaataacaaaagcaaaacaaaatgctacatgtaaaagctaaagaaagaaaatgcagcatattcaggttctttttcttgaggtacctatataaatttaatcacctgccccaaagtcctctcgttaggttaaaaacacaatgcgtcctggggagccaattgcccggcacgtcttattactgagaaagtgcaagaatgctgatcatcttatgcagcatactaaaggatgatttactctttacaaaatagagcttaagtatcaacctgatggaagttagaaaattaaaaacatttaagtagaatcatctctctctctatttttgagatcctgcagcaaaaagcctcccaaatcaactttcaaagttctgccattaaggaatgttggttctcttgtaaaattcagagatctcttt

SEQ ID NO: 334 - DNA, 190 bp, Homo sapiens
ccaaggaaggctgtgctctagcccatctgaccctgtctgcaaaccacctgggggacaaggctgatagagacctgtgcagatgtctctctctgtgcccctcactcatctcactggatctgtctgccaaccctgagatcagctgtgccagcttggaagagctcctgtccaccctccaaaagcggccccaagg

SEQ ID NO: 335 - DNA, 394 bp, Homo sapiens
aaatttggacagacttctagcggacagttacttctcaagaattttctatacaaaagctgtgccaggcatatattttctcaccaggacacatggggcagcggacccctggtgtcagtaagaacacacccagaatgatataaccagatatttttcagtttctaaattaaggcatattcaaaaaattccatgtacaagtttacaccacttttctaagttactcaccaggtaattaaagcagattcacagatgaattactctcagtttaactatatgcaacaaccatgccaataacttttcttctaaattttgcataataatggttaaaaaaagtggtagtttaactatcatgttcacaattgtcatttttcaaggcagtagaagaccaagacatttt

SEQ ID NO: 336 - DNA, 429 bp, Homo sapiens
aaaagctatcaccattgtagtagaatcatccttcttttttgaaatttgaagcatcccaggcttaaaatcttgtgtttcagaaagacagtttataccatgactgcttaattatccccccaaagaccttctgattgaagtcatgtacagttcagtggcctaaattctctgcctttttaacttgctttgcaagcctactctgaaaataagttatttagtcaagttattctcaaagatgtcccagttgcctagaaaggatcaaatggaacatttgacacacatactcaaaaaaatgtaactgactataaacactttaacctaatcatctgtatcaaactttctaaaaatcaaatctcaggattgttccactttagagattctatgtaaagtttatataactatacttgtcaaatagcacctatctatgcattt

SEQ ID NO: 337 - DNA, 373 bp, Homo sapiens
aaagatgctgttaatgaacattacggacaattcatggtgtggctagttggtaacacttcagctgatttttcttatgagatggaaaaaaaaatcagccaagtaagggcacatcttcagttcatttagaagtcagcatccaaggtaaaagaattctctgttggacttgacatcactcccatcctctgatactcgcctactctcttctcaaagaagttagtctttccttccagtgaaatattctccataaagtcaaatgggttctctactctgaaaaccttgctaaaacccagttccagcataagtctgtctgccacaaactcaatgtattgcttcatcagagtgcaattcatcccaatgagtttcacaggcaagg

SEQ ID NO: 338 - DNA, 366 bp, Homo sapiens
ccatccccttatgagcgggcgcagtgattataggctttcgctctaagattaaaaatgccctagcccacttcttaccacaaggcacacctacaccccttatccccatactagttattatcgaaaccatcagcctactcattcaaccaatagccctggccgtacgcctaaccgctaacattactgcaggccacctactcatgcacctaattggaagcgccaccctagcaatatcaaccattaaccttccctctacacttatcatcttcacaattctaattctactgactatcctagaaatcgctgtcgccttaatccaagcctacgttttcacacttctagtaagcctctacctgcacgacaacacat

SEQ ID NO: 339 - DNA, 319 bp, Homo sapiens
ccttccctccccaccaccatcaacctcttcaaaacctactccctccctctaagtatctctcaacacagtatgtctggggctagatttcaaaacccacgtaatgaaaaagtcagttttacaagcctaattttgttgtttttttttttatatcaattaacgttaaaaattgcatcaactatttaattcatgaggatctttcatattaaaatttaaccttaagattcaaccgccatgtgcttttataaaggaaacattttttagagacgtctgagctcacttttacatggtggtgcctactgccgttaatgtttgtgatttt

SEQ ID NO: 340 - DNA, 278 bp, Homo sapiens
  misc_feature 30, 31, 44, 58, 70, 71, 106, 140, 148, 156, 164, 171, 174,180, 187, 190, 196, 219: n = A,T,C or G
ctaataaaatgaattaaccactcattcatnnatctacccacccnatccaacatctccncatgatgaaacnncggctcactccttggcgcctgcctgatcctccaantcaccacaggactattcctagccatgcactactnaccagacncctcaacngccttttnatcaatnggncacatnactcganacntaaatnatggctgaatcatccgctacctncacgccaatggcagcctcaatattctttatgctgcctcttcctacacatgcgggcgagg

SEQ ID NO: 341 - DNA, 400 bp, Homo sapiens
ccagcatggggctgcagctgaacctcacctatgagaggaaggacaacacgacggtgacaaggcttctcaacatcaaccccaacaagacctcggccagcgggagctgcggcgcccacctggtgactctggagctgcacagcgagggcaccaccgtcctgctcttccagttcgggatgaatgcaagttctagccggtttttcctacaaggaattcagttgaatacaattcttcctgacgccagagaccctgcctttaaagctgccaacggctccctgcgagcgctgcaggccacagtcggcaattcctacaagtgcaacgcggaggagcacgtccgtgtcacgaaggcgttttcagtcaatatattcaaagtgtgggtccaggctttcaaggtggaaggtgg

SEQ ID NO: 342 - DNA, 536 bp, Homo sapiens
aaagaacaatgggaaaaacaagtccgtgttctcacagatgctgtcgatgacattacttccattgatgacttcttggctgtctcagagaatcacattttggaagatgtgaacaaatgtgtcattgctctccaagagaaggatgtggatggcctggaccgcacagctggtgcaattcgaggccgggcagcccgggtcattcacgtagtcacctcagagatggacaactatgagccaggagtctacacagagaaggttctggaagccactaagctgctctccaacacagtcatgccacgttttactgagcaagtagaagcagccgtggaagccctcagctcggaccctgcccagcccatggatgagaatgagtttatcgatgcttcccgcctggtatatgatggcatccgggacatcaggaaagcagtgctgatgataaggacccctgaggagttggatgactctgactttgagacagaagattttgatgtcagaagcaggacgagcgtccagacagaagacgatcagctgatagctgg

SEQ ID NO: 343 - DNA, 646 bp, Homo sapiens
aaaacttctattcatcaaaagacataaagaaaacagtcaagccacagactaggtgtaatatctcaatacatatatccgacaagagaattgcatctagaatgtataaagaatttctatgacccaattatagctatcagggatatacaaattaaaaccaaaatgaaacatcactacacaccgattggaatggttaaaaaggaaaaatactgacaacaccaatatttgtaaagacaggaggtaccagaactctcattcattatattcataaattgacaaatataaaaactgctatagtagggcagtcttccttagaaagggattgtgggcatgacagagaacaatattaatctgtccattatattccttaactgtaaaatggagaccatatgttccaccagcttcacttggtaattatgatacatggctattaagagactcaaatgactccatttcatcaactaatatgccctgtcaattctacttctaaagtatcccatgttctatccaatgtcataccactatcataatttaagtgttcataactctctataatatttcaataatctaactggtctcaatgcctgtagtagaaattgcagattgggctccccaatttctgttccctaggaaggctgagaaagctttt

SEQ ID NO: 344 - DNA, 383 bp, Homo sapiens
cctgcaccccagtataagggcctccccagctgagtaagaagctgcttcccctcctctcataggccaagcctattgtgtgaaaccatctcatggtcttggtgacgtagaccatttttgaaaccgtctcatggtcttggtgacgtagaccgtttgcttctttaactccagccgcggaatgacattagtggaaccgggctagggaactgctggaagttcaggatgccaccaccttgaacacctaggccagggatccccaccatgtcccgggtttctttcttcgagagtatagaaccgttcattcttgctttgtgtcccattccatctcttgaaaaaatgtagtctttgaatgtgtgaaaatctagggacattcaatctagtctttt

SEQ ID NO: 345 - DNA, 263 bp, Homo sapiens
cctccccttcccctttgctggtgggaggagctcgtgtgctccttggccgcttactggaagggcgtttttcagagctgcagggacagggtgagcagctgaagggctaggagggaagccggcccccgctctgcagaagctgcatttcagctgaatctgtgtttcagcctcagttggttgcaccgttagcccctctcctcccggatggtcatgtttttgtcacattagagaataaacagccacacacacatttttttttttccttt

SEQ ID NO: 346 - DNA, 132 bp, Homo sapiens; identical to SEQ ID NO: 328

SEQ ID NO: 347 - DNA, 564 bp, Homo sapiens
  misc_feature 484: n = A,T,C or G
cctgggtatccagggaggctctgcagccctgctgaagggccctaactagagttctagagtttctgattctgtttctcagtagtccttttagaggcttgctatacttggtctgcttcaaggaggtcgaccttctaatgtatgaagaatgggatgcatttgatctcaagaccaaagacagatgtcagtgggctgctctggccctggtgtgcacggctgtggcagctgttgatgccagtgtcctctaactcatgctgtccttgtgattaaacacctctatctcccttgggaataagcacatacaggcttaagctctaagatagataggtgtttgtccttttaccatcgagctacttcccataataaccactttgcatccaacactcttcacccacctcccatacgcaaggggatgtggatacttggcccaaagtaactggtggtaggaatcttagaaacaagaccacttatactgtctgtctgaggnagaagataacagcagcatctcgaccagcctctgccttaaaggaaatctttattaatcacgtatggttcacaagataattc

SEQ ID NO: 348 - DNA, 321 bp, Homo sapiens
  misc_feature 3, 12, 23, 70, 80, 89, 101, 123, 131, 151, 168, 177, 185,212, 220, 222, 233, 253, 255, 263, 264, 286, 287, 300, 302,315: n = A,T,C or G
gcncatgaacanggagcaacganaagagatgtcgggctaagggcccgggacgggcggcacccatcctgcnacggaacacnttcgggttntggttttgattngttcacctctgtttatatgcanctatttgntcctcctcccccaccccagnccccaacttcatgcttntcttccgcnctcagccnccctgccctgtcctcgcggtgagtcantgaccacngnttcccctgcangagccgccgggcgtgagacncngaccctcnntgcatacaccaggccgggcccnngctggctcccccngnggccctgtgaaanagctgg

SEQ ID NO: 349 - DNA, 255 bp, Homo sapiens
ccatgacagtgaaggggctgttaggaatatcaacaccaccgaagcgcacatagatcacatatgtgcccggcttggcagctgtgtagaagatgtcataggttccatcttcattctcaatgacatcggcctcggcctcagtgccatctggggtcagaaccgtgcaggtcactttacccttcccggcagtcttggcatcaaccacaaagcctacttcttcgccagttttcacagtggaggcgattccaggacccgtag

SEQ ID NO: 350 - DNA, 496 bp, Homo sapiens
  misc_feature 10, 27, 96, 110, 112, 309, 360, 447, 455: n = A,T,C or G
gggcttattngctcacaaaatcattcncttttggaactatggccaattgaagctacacactgaatttattaatacagcattaagtttctttgtgtnaaaaaatctttgtncncagtaataaaaaaagataaggcaagatgcattaaacatgaaaccttctggctcttttcctctgcgtttttacagagccactgatgactatctgcaacaaaagagttaagtttctgattttccgtatcaagcatcttatgcctttgctgtggtaagaattctggccaagcaccctgaaggacagatgctggtgatggnctttggcacttatgctggcaaactgagcttctttcccttgagtacttttgnaatgtacaagtagaagaagtcacaagtataggatggtctggactacgccggccaccacagcaatgaggtcaaagaagccctcaaagnagaagcgnccagatccagttgacaagatacaaagcacgatagaggccca

SEQ ID NO: 351 - DNA, 109 bp, Homo sapiens
  misc_feature 49: n = A,T,C or G
ccatagtgaagcctgggaatgagtgttactgcagcatctgggctgccanccacagggaagggccaagccccatgtagccccagtcatcctgcccagccccgcctcctgg

SEQ ID NO: 352 - DNA, 384 bp, Homo sapiens
ccttcgagagtgacctggctgcccaccaggaccgtgtggagcagattgccgccatcgcacaggagctcaatgagctggactattatgactcacccagtgtcaacgcccgttgccaaaagatctgtgaccagtgggacaatctgggggccctaactcagaagcgaagggaagctctggagcggaccgagaaactgctggagaccattgaccagctgtacttggagtatgccaagcgggctgcacccttcaacaactggatggagggggccatggaggacctgcaggacaccttcattgtgcacaccattgaggagatccagggactgaccacagcccatgagcagttcaaggccaccctccctgatgccgacaaggagcgcctgg

SEQ ID NO: 353 - DNA, 345 bp, Homo sapiens
  misc_feature 19, 41, 59, 110, 124, 131, 230, 231, 239, 245, 247, 273,280, 284, 285, 296, 303, 325, 343: n = A,T,C or G
ccttggtcaggatgaagtnggctgacacaccttagcttggntttgcttattcaaaaganaaaataactacacatggaaatgaaactagctgaagccttttcttgttttancaactgaaaattgnacttggncacttttgtgcttgaggaggcccattttctgcctggcagggggcaggtatgtgccctcccgctgactcctgctgtgtcctgaggtgcatttcctgttgnncacacaanggccangntccattctccctcccttttcaccagngccacancctnntctggaaaaangaccagnggtcccggaggaacccatttgngctctgcttggacagcanag

SEQ ID NO: 354 - DNA, 712 bp, Homo sapiens
ccatctacaatagcatcaatggtgccatcacccagttctcttgcaacatctcccacctcagcagcctgatcgctcagctagaagagaagcagcagcagcccaccagggagctcctgcaggacattggggacacattgagcagggctgaaagaatcaggattcctgaaccttggatcacacctccagatttgcaagagaaaatccacatttttgcccaaaaatgtctatttttgacggagagtctaaagcagttcacagaaaaaatgcagtcagatatggagaaaatccaagaattaagagaggctcagttatactcagtggacgtgactctggacccagacacggcctaccccagcctgatcctctctgataatctgcggcaagtgcggtacagttacctccaacaggacctgcctgacaaccccgagaggttcaatctgtttccctgtgtcttgggctctccatgcttcatcgccgggagacattattgggaggtagaggtgggagataaagccaagtggaccataggtgtctgtgaagactcagtgtgcagaaaaggtggagtaacctcagccccccagaatggattctgggcagtgtctttgtggtatgggaaagaatattgggctcttacctcccaatgactgccctacccctgcggaccccgctccagcgggtgggggattttcttggactatgatgctgggggagg

SEQ ID NO: 355 - DNA, 385 bp, Homo sapiens
cctcatagccgcttagcacagttacagaatgtctgaaggggacagtgtgggagaatccgtccatgggaaaccttcggtggtgtacagatttttcacaagacttggacagatttatcagtcctggctagacaagtccacaccctacacggctgtgcgatgggtcgtgacactgggcctgagctttgtctacatgattcgagtttacctgctgcagggttggtacattgtgacctatgccttggggatctaccatctaaatcttttcatagcttttctttctcccaaagtggatccttccttaatggaagactcagatgacggtccttcgctacccaccaaacagaacgaggaattccgccccttcattcgaaggctcccagagttt

SEQ ID NO: 356 - DNA, 347 bp, Homo sapiens
aaatgagataaagaaagtctccttttgtttttagatggaaaagaaagcacaagttttttctacctgtgaatgaactttggtgacctatatgtgccattcatgcagcatttttgttcatattggcttagaattcagtgcatgaatatcattacattcttatatctaacattcctagttagctttgattcaaaatatacaaaatctgatacatgaatactttgctagattaatgacttgatcatctttggaatgagtaggcaagacgatttttacctattatttctatgttgtgggtaatgttaaaactaaatacagatgataataattgctatttcacagtgatgttt

SEQ ID NO: 357 - DNA, 313 bp, Homo sapiens
aaagtaatcaacctctctgtccttccattagtctggatcgtctaaagattgttttatttttagaggctcatccggtcagatgttagtgatgtgaaatttcaggccaggcgtgacgtcagcgtggcatttgaaacagctccatgttgcccttagtgctgtctgaccgaagcctgtctgtcctcagatataaagatgaagcgcagctgtataaagaagagcacctgaggaatcggcagcaccctcactgctacgttcagtacatgatcgccatcatcaacaactgccagaccttcaaggaatccatagtcagttt

SEQ ID NO: 358 - DNA, 403 bp, Homo sapiens; identical to SEQ ID NO: 293

SEQ ID NO: 359 - DNA, 411 bp, Homo sapiens
aaataaatacttagaacacgacttggctcctacaagcatctggactctaggtctcagtactggagtgtctcacccatgggccccacgcagggacgccacggttccctcccaccccgtgatcaagacacggaatcggctgccgatggttggatcgcaatgcgccccttttctagagccttccccggccatctacaggcaggatgcggctgggaaaaagacaactggaatttctcgaaggttgatggtccgcacggttgaggattctacgtggttctcttggttcccctggtgtgtgtgtgtgtggaggaggccgcggcccttagatcaccttcttgagctcgtcgtacaggaccagcacgaaggcgccccccatgccccgcaggacgttggaccacgcacccttgaagaagg

SEQ ID NO: 360 - DNA, 378 bp, Homo sapiens
  misc_feature 276, 328: n = A,T,C or G
cctcttcaggggcccgagccagggacagggccttggtttccttctccctggcttctgcctcagctctgtccctctcatccgcgtatttggaagagatgtttttctcctcggctaacaactgatcaaatttcctctgcttcttttccaggttggacacgagttgccgctggttgtccaaatcaacaaccaggtcgtccagctcctgctgaagcctgttcttggtcttttccagtttatcataagcggccgccttctcctcgtactgctgggtgaggntctcgatctccttctggaacctcttcttcccctcttccagagcttccacggngctggcaaagtcctgcagcttcttcttcgagtcggagagctggatgttga

SEQ ID NO: 361 - DNA, 372 bp, Homo sapiens
aaatactgggggccattaagagtggatgtagctaagagcttagctaacattgccttttcactctatttttctcagatattgtaagcattctgtttttcaatattgtagttaattttttggctttcaacagcagccctagtaatggtggagttgttaattaatgtgtatattgtactgaatttctgtcagttaaggggttcactgctttggtggaaattggtggaaattgctagcaggttccacgatgtttatttttttctccatgttgtatatcattaccatttcacatacgcgtttctatttttcttcctctcctcctgatctccttaaaaatgaatctagagttggtggctttttccccctcctctttgg

SEQ ID NO: 362 - DNA, 544 bp, Homo sapiens
cctgagtcacctagcatagggttgcagcaagccctggattcagagtgttaaacagaggcttgccctcttcaggacaacagttccaattccaaggagcctacctgaggtccctactctcactggggtccccaggatgaaaacgacaatgtgcctttttattattatttatttggtggtcctgtgttatttaagagatcaaatgtataaccacctagctcttttcacctgacttagtaataactcatactaactggtttggatgcctgggttgtgacttctactgaccgctagataaacgtgtgcctgtcccccaggtggtgggaataatttacaatctgtccaaccagaaaagaatgtgtgtgtttgagcagcattgacacatatctactttgataagagacttcctgattctctaggtcggttcgtggttatcccattgtggaaattcatcttgaatcccattgtcctatagtcctagcaataagagaaatttcctcaagtttccatgtgcggttctcctagctgcagcaatactttgacattt

SEQ ID NO: 363 - DNA, 328 bp, Homo sapiens
aaactggttatgacaaaagcctttagttgtgtttcttgaactataaagaaaacaaattttggcagtctttaagtatatatagcttaaaatataatttttagcatttggcaccatatgtatgccattatatttgattttgcattactgtttcacaatgaagctttctttaaggctttgatttttatgattatgaaagaaataaggcacaaccacagtttttctttcttaaatttcatcactgttgatgtggttcttttgtgttaaaaaaaaaaagtgcaactatcaaaactaaaaaattatagagtaatattgccgttctgctgatttt

SEQ ID NO: 364 - DNA, 569 bp, Homo sapiens
cctgggcacctctttgcttgaaatatggcaagacttggaaaaatgtttgcccttagaatctatctcactactttagttagttgtctcctttgggcctgggcacagttctggccctgatctggaacagactcccttttctaaaactgaacttgaccacatcaaaagtttgtaaaacaatctccatggtaattaaacttgcattcaacaccatatggtaacagaagatggcaaaggataagattcagatcttagatctttccaagtagggcatgttagatgatagaaggattagttgcaagctggatctgagctcaggcttgggcatgaaggaaactgtctcccatgtggtttggaagagttaggggctccctgagctctattgtgaactatacgggtttcatccaaggaatggtatgatgtgggcataaaaccattcttcagacaactgaagatggtccccttctgtagccagaaacactagctgtcctgcattgtccatttcctttagccccaggcggtcctgtgtgtacagggaggtctcctgtaagggaatggtttccttggcttgg

SEQ ID NO: 365 - DNA, 151 bp, Homo sapiens
aaaaaaaaaaatccttttattatggaatttgtcaaacacacacacaagcataacaaacccctaggtacccatctccaagttttgacccctattataatttcatcttcagtgttttattatccacttcctctctctctatctttagtatttt

SEQ ID NO: 366 - DNA, 508 bp, Homo sapiens
  misc_feature 43, 99, 132, 136, 138, 142, 180, 204, 208, 228, 233, 249,293, 307, 309, 347, 358, 374, 401, 434, 436, 440, 442, 463: n = A,T,C or G
agtataaagatatattccataaaagagtttggcagtcaaaganaagcatcgcacttccgaaaaacacaagcattcttctcctagtctacagagaattgngtaaaaaaaaaaaaaaatcatcatcaacagccnccantntacnccacactagaatgtacactccggcaagtaaattaaggntgcagtccatccctgaacgatganaagnggtctgagctatggcaaagngttanaaagtagcccagctanacaaatgccccagctatccccaggggagttattcagtacttaanacttcatttccaanancagccccggaaaagccctgacaggaaggggggaccagngatcaccgatntcccattaggggcggncaccaaaaacaaaatgcctggagcttntgagcagctgcagcctggggttgtggctaggcncngggngnggttgcaaaaaaacggctgtntccggggagaggcaaatggcaggccagccagccctgggtacatgg

SEQ ID NO: 367 - DNA, 382 bp, Homo sapiens
cctgagcggctagtctttaagatgcgcttctatcgtttgctgcaaatccgagcagaagccctcctggcggcaggcagccatgtgatcattctgggtgacctgaatacagcccaccgccccattgaccactgggatgcagtcaacctggaatgctttgaagaggacccagggcgcaagtggatggacagcttgctcagtaacttggggtgccagtctgcctctcatgtagggcccttcatcgatagctaccgctgcttccaaccaaagcaggagggggccttcacctgctggtcagcagtcactggcgcccgccatctcaactatggctcccggcttgactatgtgctgggggacaggaccctggtcatagacacctttcagg

SEQ ID NO: 368 - DNA, 174 bp, Homo sapiens
ccttctccctctttgacaaggatggagatggcactatcaccaccaaggagttggggacagtgatgagatccctgggacagaaccccactgaagcagagctgcaggatatgatcaatgaggtggatgcagatgggaacgggaccattgacttcccggagttcctgaccatgatgg

SEQ ID NO: 369 - DNA, 216 bp, Homo sapiens
aaatctcatgggttctattaaaaaaatatatatatagggccccaatccattgccatcaaattgcccttggacttttccaaggtatattatggggttttatgcaaaattccaagctaccatgtaactttttttaaccatttaacaaggagggggaactgtttcctaccttctttacatgttgtgcattgttgtggtccagaaatgccaaaccttttt

SEQ ID NO: 370 - DNA, 344 bp, Homo sapiens
ccttggtcaggatgaagttggctgacacagcttagcttggttttgcttattcaaaagagaaaataactacacatggaaatgaaactagctgaagccttttcttgttttagcaactgaaaattgtacttggtcacttttgtgcttgaggaggcccattttctgcctggcagggggcaggtctgtgccctcccgctgactcctgctgtgtcctgaggtgcatttcctgttgtacacacaagggccaggctccattctccctccctttccaccagtgccacagcctcgtctggaaaaaggaccaggggtcccggaggaacccatttgtgctctgcttggacagcagg

SEQ ID NO: 371 - DNA, 741 bp, Homo sapiens
  misc_feature 644, 646, 689: n = A,T,C or G
aaattacatatctaattgtgtgatttgttaaatgcccatttcttcatctaagtgctaagtgctaagtgtagcagtttgttccctgctacactccaaggcacaaaggagttcaaggaatgtgcaatggaaatcagttagatgaatgtgttaggaaccttccctttaataaagctggatcccacactagcccctacaccctctcatcaccaaatattcctgcttcctctcacctgcacttgctgttctctcctctgccacacaaatctacctctcaagcctaggtcccacctgcttcatgacaactttccagactattccagaacctttaaccatctctgacctctcatcagatctatgttgtacataacaccaattaatgagatcattactgctttatgctctaattgcttcctgtattcaaaatcttctctccaaccacataatgactccctaaacttctcttgtattttccaatgccttgtacaagcacagaactggtcaatcaataaatactcactggttatttgaggaaaaaatgttgccaagcaccatctttatcagaaaataaatcaattcttctaaacttggagaaatcaccctattcctagtatgtgatcttaattagaacaattcagattgagaangngacagcatgctggcagtcctcagagccctcgcttgctctcggnacctccctgcctgggctcccactttggtggcatttgaggagcccttcagcct

SEQ ID NO: 372 - DNA, 218 bp, Homo sapiens
  misc_feature 57, 218: n = A,T,C or G
ccgccagtgtgctggaattcgcccttggccgcccgggcaggtaccacaacagcaggnctgagtgagaaatctaccaccttctacagtagccccagatcaccggacacaacactctcacctgccagcacgacaagctcaggcgtcagtgaagaatccaccacctcccacagccgaccaggctcaacgcacacaacagcattccctggcagtaccttggn

SEQ ID NO: 373 - DNA, 168 bp, Homo sapiens
actgctagggaatgctgttgtgtgcattgagcctggtcggctgtgggaggtggtggattcttcactgacgcctgagcttgtcgtgctggcaggtgagagtgttgtgtccggtgatctggggctactgtagaaggtggtagatttctcactcaggcctgctgttgtggt

SEQ ID NO: 374 - DNA, 154 bp, Homo sapiens
  misc_feature 25, 34: n = A,T,C or G
tgagaaatctaccaccttctacagngagccccanatcaccggacacaacactctcacctgccagcacgacaagctcaggcgtcagtgaagaatccaccacctcccacagccgaccaggctcaacgcacacaacagcattccctggcagtacctc

SEQ ID NO: 375 - DNA, 275 bp, Homo sapiens
actgccaggggacagtgctgtgtcagttgaacctgggctgctgtgggaagttgttgattcctgactggggcctgaggtggtggtgctggcaggtaacagtgttgtatccgttgagcctgggctgctgtgggaagttgtagaatgccgactgaggcctggcgtggtggtgctgtcagggaatgctgttgtgtgcgttgagcctggtcggctgtgggaggtggtggattcttcactgacgcctgagcttgtcgtgctggcaggtgagagtgttgtgg

SEQ ID NO: 376 - DNA, 191 bp, Homo sapiens
  misc_feature 173: n = A,T,C or G
actgccaggggacagtgctgtgtcagttgaacctgagctgctgtgggaagttgttgattcctgactggagcctgaggtggtggtgctggcaggtaacagtgttgtatccgttgagcctgggctgctgtgggaagttgtagaatgccgactgaggcctgccgtggtggtgctgntagggaatgctgctagcg

SEQ ID NO: 377 - DNA, 476 bp, Homo sapiens
ccgccagtgtgctggaattcgcccttggccgcccgggcaggtacatttccttgtagactctgttaatttcctgcagctcctggttggttctggagcagatgatctcaatgagagagtcctcgtcggttcccagccccttcatggaagcttttagctcagaagcgtcatactgagcaggtgtcttcaataggcccaaaatcaccgtctccaggtggccagataaggctgacttcagtgctgatgcaagttcctttttggtccttctctggtaggcgaaggcaatatcctgtctctgtgcattgctgcggttggtcaaaatgttgacaatggtgacctcatccacacctttggtcttgatggctgtttcaatgttcaaagcatcccgctcagcatcaaagttagtataggctttgacagacccatatgcacttgggggtgtagagtgatcaccctccaagccgagcttgcacaggatt

SEQ ID NO: 378 - DNA, 455 bp, Homo sapiens
  misc_feature 370: n = A,T,C or G
agtgtgctggaattcgcccttggccgcccgggcaggtacacatcccatcttcaaatttaaaatcatattgtcagttgtccaaagcagcttgaatttaaagtttgtgctataaaattgtgcaaatatgttaaggattgagacccaccaatgcactactgtaatatttcgcttcctaaatttcttccacctacagataatagacaacaagtctgagaaactaaggctaaccaaacttagatataaatcctaccaataaaatttttcagttttaagttttacagtttgatttaaaaacaaaacagaaacaaatttcaaaataaatcacatcttctcttaaaacttggcaaacccttccctaactgtccaagtntgagcatacactgccactggctttagatactccaattaaatgcactactctttcactggtctgaatgaagtatggtgaaacaagc

SEQ ID NO: 379 - DNA, 297 bp, Homo sapiens
  misc_feature 16, 289: n = A,T,C or G
agctcggatccctagnacggccgccagtgtgctggaattcgcccttagcggcggcccgggcaggtacaaagaatccttagacgccatactgagttttaagttccttaattcctaatttaaggcttctagtgaagcctcctcacagtaggcttcactaggcccacagtgcccctagacctctgacaatcccaccctagacagactttattgcaaaatgcgcctgaagaggcagatgattcccaagagaactcaccaaatcaagacaaatgtcctagatctctagtgtggnagaactat

SEQ ID NO: 380 - DNA, 144 bp, Homo sapiens
  misc_feature 72: n = A,T,C or G
actttgctgaaaattctttttcccagggtctataaaacattaatttgtttttatattttactatttttttgngtttttttgtttttaaatcaataagtaatctaggactagcattatgtttgctagacctggcatttgctcggc

SEQ ID NO: 381 - DNA, 424 bp, Homo sapiens
actcttgaatacaagtttctgataccactgcactgtctgagaatttccaaaactttaatgaactaactgacagcttcatgaaactgtccaccaagatcaagcagagaaaataattaatttcatgggactaaatgaactaatgaggataatattttcataattttttatttgaaattttgctgattctttaaatgtcttgtttcccagatttcaggaaactttttttcttttaagctatccacagcttacagcaatttgataaaatatacttttgtgaacaaaaattgagacatttacattttctccctatgtggtcgctccagacttgggaaactattcatgaatatttatattgtatggtaatatagttattgcacaagttcaataaaaatctgctctttgtataacagaatacatttgaaaa

SEQ ID NO: 382 - DNA, 408 bp, Homo sapiens
actcttgaatacaagtttctgataccactgcactgtctgagaatttccaaaactttaatgaactaactgacagcttcatgaaactgtccaccaagatcaagcagagaaaataattaatttcatgggactaaatgaactaatgaggataatattttcataattttttatttgaaattttgctgattctttaaatgtcttgtttcccagatttcaggaaactttttttcttttaagctatccacagcttacagcaatttgataaaatatacttttgtgaacaaaaattgagacatttacattttctccctatgtggtcgctccagacttgggaaactattcatgaatatttatattgtatggtaatatagttattgcacaagttcaataaaaatctgctctttgtatgac

SEQ ID NO: 383 - DNA, 455 bp, Homo sapiens
  misc_feature 70, 72, 73, 184, 185, 330: n = A,T,C or G
actcttgaatacaagtttctgataccactgcactgtctgagaatttccaaaactttaatgaactaactgncnncttcatgaaactgtccaccaagatcaagcagagaaaataattaatttcatgggactaaatgaactaatgaggataatattttcataattttttatttgaaattttgctgannctttaaatgtcttgtttcccagatttcaggaaactttttttcttttaagctatccacagcttatagcaatttgataaaatatacttttgtgaacaaaaattgagacatttacattttctccctatgtggtcgctccagacttggnaaactattcatgaatatttatattgtatggtaatatagttattgcacaagttcaataaaaatctgctctttgtataacagaatacatttgaaaacattggttatattaccaagactttgactaga

SEQ ID NO: 384 - DNA, 376 bp, Homo sapiens
  misc_feature 276, 357: n = A,T,C or G
actcttgaatacaaggttctgatatcactgcactgtctgagaatttccaaaactttaatgaactaactgacagcttcatgaaactgtccaccaagatcaagcagagaaaataattaatttcatgggactaaatgaactaatgaggataatattttcataattttttatttgaaattttgctgattctttaaatgtcttgtttcccagatttcaggaaacttttttttcttttaagctatccacagcttacagcaatttgataaaatatacttttgngaacaaaaattgagacatttacattttctccctatgtgggcgctccagacttgggaaactattcatgaatatttatattgnatgggaatatagcattgcc

SEQ ID NO: 385 - DNA, 422 bp, Homo sapiens
acctgtgggtttattacctatgggtttatatcctcaaatacgacattctagtcaaagtcttggtaatataaccaatgttttcaaatgtattctgtcatacaaagagcagatttttattgaacttgtgcaataactatattaccatacaatataaatattcatgaatagtttcccaagtctggagcgaccacatagggagaaaatgtaaatgtctcaatttttgttcacaaaagtatattttatcaaattgctgtaagctgtggatagcttaaaagaaaaaaagtttcctgaaatctgggaaacaagacatttaaagaatcagcaaaatttcaaataaaaaattatgaaaatattatcctcattagttcatttagtcccatgaaattaattattttctctgcttgatcttggtggacagtttc

SEQ ID NO: 386 - DNA, 313 bp, Homo sapiens
caagtaggtctacaagacgctacttcccctatcatagaagagcttatcacctttcatgatcacgccctcataatcattttccttatctgcttcctagtcctgtatgcccttttcctaacactcacaacaaaactaactaatactaacatctcagacgctcaggaaatagaaaccgtctgaactatcctgcccgccatcatcctagtcctcatcgccctcccatccctacgcatcctttacataacagacgaggtcaacgatccctcccttaccatcaaatcaattggccaccaatggtactgaacctacgagt

SEQ ID NO: 387 - DNA, 236 bp, Homo sapiens
cgccctcataatcattttccttatctgcttcctagtcctgtatgcccttttcctaacactcacaacaaaactaactaatactaacatctcagacgctcaggaaatagaaaccgtctgaactatcctgcccgccatcatcctagtcctcatcgccctcccatccctacgcatcctttacataacagacgaggtcaacgatccctcccttaccatcaaatcaattggccaccaatggt

SEQ ID NO: 388 - DNA, 195 bp, Homo sapiens
acgcccttttcctaacactcacaacaaaactaactaatactaacatctcagacgctcaggaaatagaaaccgtctgaactatcctgcccgccatcatcctagtcctcatcgccctcccatccctacgcatcctttacataacagacgaggtcaacgatccctcccttaccatcaaatcaattggccaccaatggt

SEQ ID NO: 389 - DNA, 183 bp, Homo sapiens
  misc_feature 31, 32, 60, 115: n = A,T,C or G
taacactcacaacaaaactaactaatactannatctcagacgctcaggaaatagaaaccncctgaactatcctgcccgccatcatcctagtcctcatcgccctcccatccctacncatcctttacataacagacgaggtcaacgatccctcccttaccatcaaatcaattggccaccaatggt

SEQ ID NO: 390 - DNA, 473 bp, Homo sapiens
acaaagcagcaactgcaatactcaaggttaaaacattagaaaagcatttgtgtgacaggtatattacagtattatcaaaatattacattttcagacttacttagcagataatcatccaccagagcttaaatctttaaattatttccatagtcttaaaaaatatgtaatgtcagaatgcatataaaaagaatgtaaaaggaaacctaaaatacaaatggaataatgtaacaaataaatatttgatttcagtaactgttaataatcagctcaacaccaccattctctctaaactcaatttaattcttataggaataatgaactgtcaaatgccatggcataattatttatttccaagctatcatcaatgattagaactaaaaaaaatttggcataaaaaaatcacaattcagcataaataaagctatttttagcttcaacactagctagcatctctaagaattgttgaaataagt

SEQ ID NO: 391 - DNA, 216 bp, Homo sapiens
  misc_feature 41, 42: n = A,T,C or G
atttgtattttaggtttccttttacattctttttatatgcnntctgacattacatattttttaagactatggaaataatttaaagatttaagctctggtggatgattatctgctaagtaagtctgaaaatgtaatattttgataatactgtaatatacctgtcacacaaatgcttttctaatgttttaaccttgagtattgcagttgctgctttgt

SEQ ID NO: 392 - DNA, 98 bp, Homo sapiens
acttatttcaacaattcttagagatgctagctagtgttgaagctaaaaatagctttatttatgctgaattgtgatttttttatgccaaatttttttaa

SEQ ID NO: 393 - DNA, 397 bp, Homo sapiens
tgccgatatactctagatgaagttttacattgttgagctattgctgttctcttgggaactgaactcactttcctcctgaggctttggatttgacattgcatttgaccttttatgtagtaattgacatgtgccagggcaatgatgaatgagaatctacccccagatccaagcatcctgagcaactcttgattatccatattgagtcaaatggtaggcatttcctatcacctgtttccattcaacaagagcactacattcatttagctaaacggattccaaagagtagaattgcattgaccgcgactaatttcaaaatgctttttattattattattttttagacagtctcactttgtcgcccaggccggagtgcagtggtgcgatctcagatcagtgt

SEQ ID NO: 394 - DNA, 373 bp, Homo sapiens
  misc_feature 283: n = A,T,C or G
ttacattgttgagctattgctgttctcttgggaactgaactcactttcctcctgaggctttggatttgacattgcatttgaccttttatgtagtaattgacatgtgccagggcaatgatgaatgagaatctacccccagatccaagcatcctgagcaactcttgattatccatattgagtcaaatggtaggcatttcctatcacctgtttccattcaacaagagcactacattcatttagctaaacggattccaaagagtagaattgcattgaccacgactantttcaaaatgctttttattattattattttttagacagtctcactttgtcgcccaggccggagtgcagtggtgcgatctcagatcagtgt

SEQ ID NO: 395 - DNA, 411 bp, Homo sapiens
  misc_feature 327: n = A,T,C or G
actgatcattctatttccccctctattgatccccacctccaaatatctcatcaacaaccgactaatcaccacccaacaatgactaatcaaactaacctcaaaacaaatgataaccatacacaacactaaaggacgaacctgatctcttatactagtatccttaatcatttttattgccacaactaacctcctcggactcctgcctcactcatttacaccaaccacccaattatctataaacctagccatggccatccccttatgagcgggcgcagtgattataggctttcgctctaagattaaaaatgccctagcccacttcttacngcaaggcacacctacaccccttatccccatactagttattatcgaaaccatcagcctactcattcaaccaatagccctggccgt

SEQ ID NO: 396 - DNA, 411 bp, Homo sapiens
actgatcattctatttccccctctattgatccccacctccaaatatctcatcaacaaccgactaattaccacccaacaatgactaatcaaactaacctcaaaacaaatgatagccatacacaacactaaaggacgaacctgatctcttatactagtatccttaatcatttttattgccacaactaacctcctcggactcctgcctcactcatttacaccaaccacccaactatctataaacctagccatggccatccccttatgagcgggcgcagtgattataggctttcgctctaagattaaaaatgccctagcccacttcttaccacaaggcacacctacaccccttatccccatactagttattatcgaaaccatcagcctactcattcaaccaatagccctggccgt

SEQ ID NO: 397 - DNA, 351 bp, Homo sapiens
  misc_feature 1, 7, 71, 93, 208, 276, 340, 345: n = A,T,C or G
ngccgangtacaaaaaaaagcacattcctagaaaaaggtattggcaaatagtaaaaatgggaggtcaaaancaaaaaaaaaaaaaacaaaacnaaaaaaagaaaaaaccaacaattcttcaattcagtgtgcaaacattatataaaaatagaaatactaactctacaggcagtatttcctgataaattatttaaatagcatatctacncaatctgagatatctattccaatggcaatgagaaaataatttataaaaataaagcaatggtataccanatgatagaaaaaaacataactttcagaaattgtatttaacatttcaatgctatttccttattgngaatncttctc

SEQ ID NO: 398 - DNA, 363 bp, Homo sapiens
acaaaaaaaagcacattcctagaaaaaggtattggcaaatagtaaaaatgggaggtcaaaagcaaaaaaaaaaaaaacaaaacaaaaaaaagaaaaaaccaacaattcttcaattcagtgtgcaaacattatataaaaatagaaatactaactctacaggcagtatttcctgataaattatttaaatagcatatctacacaatctgagatatctattccaatggcaatgagaaaataatttataaaaataaagcaatggtataccagatgatagaaaaaaacataactttcagaaattgtatttaacatttcaatgctatttccttattgggaatacttctctgcagagtttttatgctatgt

SEQ ID NO: 399 - DNA, 360 bp, Homo sapiens
actgtttcctcgtggttcaggggtgtgcatgaaggctcttaggagagcaaacacctgttcctattctgtatgtccctccctcatttcaaatgagagtaaccaattgagtaaaataaccaaataaccattgccccaccatgaacatggggcttgggaagacagtcctacaatcttcatcatatatttaggtttttaggccagccagctctttttttccaaagctttcttttgaatacccgcccgggcggcccctaagggcgaattctgcagatatccatcacactggcggccgctcgagcatgcatctagagggcccaattcgccctatagtgagtcgtattacaattcactggccgtcgt

SEQ ID NO: 400 - DNA, 87 bp, Homo sapiens
  misc_feature 12, 43, 83, 85: n = A,T,C or G
ctgcacatatcnattacactggcggccgctcgagcatgcatgnagagggcccaattctccctatattgagtggaattacaatncnct

SEQ ID NO: 401 - DNA, 328 bp, Homo sapiens
  misc_feature 206: n = A,T,C or G
acccagggacacaaacactctgcctaggaaaaccagagacctttgttcacttgtttatctgctgaccttccttccactattgtcctatgaccctgccaaatccccctctgcgagaaacacccaagaatgatcaataaaaaataaaataaaattaaattaaaaaaaaaaaaagagaggaacccacaaaaaaaaaaaaaaagaaagtntataaaataaaatattgaagtcctttcccattaaaaaaaaaaaaaagaaaaagcacggactctttcatccagttctgatgtgattatctctggaaggcattttctcctcctcttccctcccc

SEQ ID NO: 402 - DNA, 268 bp, Homo sapiens
  misc_feature 1, 227, 253: n = A,T,C or G
nacataatgacaacatcttcactagactgagtgttcaaggatttgagatgattcgctattcatcacaccccgaagattgagatccactgtatttacacaaagcaaagccatgtcagcaagggactgtcaacctgattctgagaacataaacattcaaaatttattttccagtgttcctttttggaaaccaacaacacatctttaatacctacacacacacacatctntacctttaaaaaaaaaaaaaaagtgnaacttcacagatagt

SEQ ID NO: 403 - DNA, 538 bp, Homo sapiens
acagtgatagctccccctgggcaatacaatacaagaacagtgggttttgtcaaattggaacaaggaaacagaaccacagaaataaatacattggttaacatcagattagttcaggttacttttttgtaaaagttaaagtagaggggacttctgtattatgctaactcaagtagactggaatctcctgtgttctttttttttttaaattggttttaattttttttaattggatctatcttcttccttaacatttcagttggagtatgtagcatttagcaccactggctcaatgcgctcacctaggtgagagtgtgaccaaatcttaaagcattagtgctattatcagttaccaccatttggggcttttatccttcatgggttatgatgttctcctgatgacacatttctctgagttttgtaattccagccaaagagagaccattcactatttgatggctggctgcatgcagacatttaaagcttttagagaatacactacaccagggagtatgactactagtatgactattaggagggt

SEQ ID NO: 404 - DNA, 310 bp, Homo sapiens
tttttttatagatacaattggcttttatttgtgattcatgagtcagggcagtttccattctgcaaaatatagtgatagctcctactgggcaatacaacagtagaacagtgggttttgtaaaatgggaatccaggaacagaagaatataaataaattgatttaaataaactgattggttaatttcagaatacttcatattacttttttctaagagttaaagcagaaaggactttcttactgtgctgactcagacagcctggactctcatgtttttaggaaaattttgtctgttctgggatctacctgcttc

SEQ ID NO: 405 - DNA, 559 bp, Homo sapiens
acaaatcacaattattaactcactggtagggcagtgatgatcaaaccaattgcattcatccatgctgtaatgttctctcttggcactaaaggctgactgcagccggcaaaaaagaatgtaagtatgaatttataaaaacattttagatggctgacaacggatcttatttttaaagaatatgtctaattcagaggatcgacaactaatccatttcaataaaacaatggggaattttttattgaataaaaatgtaatatgcataaaaactcaagaaggctttttaaaaatacttcctccccaatcattatcccatacttcatgctaatttttaaaagaatcttgaaatcttgaaaacaagatgaagagaatcttgttttaagtgacaagttaacattattcctatattaaatgtcaaactgctattaatgagtagaagtaggaacaaacccggatcttaggatcctgtccagggctcattccataactcctatatcacaaagacaagatctggaaccagaaaacagtcatcatccaatgtgcatcagccttgcggcaacag

SEQ ID NO: 406 - DNA, 427 bp, Homo sapiens
acaacagaatatctcgggaatggactcagaagtatgccatgtgatgctaccttaaagtcagaataacctgcattatagctggaataaactttaaattactgttccttttttgattttcttatccggctgctcccctatcagacctcatcttttttaattttattttttgtttacctccctccattcattcacatgctcatctgagaagacttaagttcttccagctttggacaataactgcttttagaaactgtaaagtagttacaagagaacagttgcccaagactcagaatttttaaaaaaaaaaatggagcatgtgtattatgtggccaatgtcttcactctaacttggttatgagactaaaaccattcctcactgctctaacatgctgaagaaatcatctgagggggagggagatggatgctc

SEQ ID NO: 407 - DNA, 419 bp, Homo sapiens
acaatttgtagttgtttccaggtttggctaataatcattccttaacctagaattcagatgatcctggaattaaggcaggtcagaggactgtaatgatagaattaaattagtgtcactaaaaactgtcccaaagtgctgcttcctaataggaattcattaacctaaaacaagatgttactattatatcgatagactatgaatgctatttctagaaaaagtctagtgccaaatttgtcttattaaataaaaacaatgtaggagcagcttttcttctagtttgatgtcatttaagaattactaacacagtggcagtgttaaatgaagatgctgtctacaaggtagataatatactgtttgatactcaaaacatttttcattttgtttaaagtagaagttacataattctatattttaagtct

SEQ ID NO: 408 - DNA, 523 bp, Homo sapiens
  misc_feature 520: n = A,T,C or G
acatttgatgttatgtgaatgttgagtttttttcttctaattttcacttcagcagtgtttagggctttcagatgccttattccagtgtgaacagaaaaagttcatattttatgtggttaatgctttgatgtgtcacataaagagtagtttgtagaaaatgttggcacaattttaacttcttagtggcttgtgacattatatattatatatatatgtatatatatctttataacattcctgtgtttagtagtgtaaatgttctgggcaagttttaatattttgaatgcctttggatattccagcaataaaggcatcatgttctgcaataggatttcttactcatttacctattttaacactaaaatagaccacaactgagcacaaattccttttataaatgttatagaagcagggaagaataataaacacatttgtgaattgtggttcagtttatttatctttagggaaggctgatcatttatcttatagcacataaccccagcctcttattcattatggntaa

SEQ ID NO: 409 - DNA, 191 bp, Homo sapiens
  misc_feature 156, 190: n = A,T,C or G
accccgtagtgatgagcactgactggttcactggccacattttagttcttcataataataggccacaaaagggctctgtggtttgcctccatgtgcactggcccctccccacccctagggggcactcagtagctgctgagaaggcctgtccacgangctgttggaaccccttcaataaatacttagaagna

SEQ ID NO: 410 - DNA, 403 bp, Homo sapiens
  misc_feature 399: n = A,T,C or G
acactggccagtgtgtttttggcgattaaacataatcctgtgaatcagattaattcacttgctgagtgttcatttgcggcatccctctgttgggtcttgggggccctccacgacctcgtggggctccccgtggtccactctgcccagagcctcgcttgaaattctgctgatatccatcccgttgatagccagagtaatcccggggagcactgaactgagactgtgtataaccactgtttggagtgttagagaatgaagggcggtaaccatcatatcctcctctgaatccattggcagggccccggtatccattcatcaagcctctagcaccacgggagcctccacgagacacaccacgactattgtaatagggctgattgctacgtggaaatccagtgntctg

SEQ ID NO: 411 - DNA, 384 bp, Homo sapiens
acgtgaaatcataacaacatgttctcttgtgtttggcttctcttgctcagcatgatatttttacggttcacccatattgcatgtatcaggaatataatcctttttattattgagtagtgttctattgtatgtatataccacagtttatttctcccttcatcctttgctagattttggggttttttcacattgcgctattcaagtataaacctgctctcaacattcatgtgcaagtctttgagtggacatatatttgccgtttctcttgagtgaatgcaccttgttgggtcacgtggcttaatttaaaaaaattttaatcactgtggtgcatatgtagtgattattagtgattatctcataattttattttcttgatgactaatg

SEQ ID NO: 412 - DNA, 315 bp, Homo sapiens
  misc_feature 71, 314: n = A,T,C or G
acaatatttctcctttgagaagataggatatatgattttcccaaaaatcacaactttgaaggaagacttanttgctgacttcaattatatcctggaactggcaacttgtgcccttcctttgcttcaaaaaaagtgtaagaaagagtgataagatcaactttaatcattcttggatcttcagcaaattcaggatcaatgtagaaaaacactggcatatctacttcctcttggggattaagcctttgttcttcaaaacagaagcactgtattttattgaaatactgtccaccttcaaatggaacaatattgtatgna

SEQ ID NO: 413 - DNA, 554 bp, Homo sapiens
  misc_feature 479, 542, 551: n = A,T,C or G
acaggtttcactattacaaatatatgatgttaaactaacaaactcatgaccttcaaagatgtcttcgtcccacgcacacacatttgtaatttgtgtccatttgctatttcccttcttctataatcttcaaattatatagttatgcattgagttccctatgcatctcacccatctcctttatctcagccttctcatactttgccattctcttctttctggaaataaccagcacaacaattccagcaacaactgctatcaccacaaccacaataacagcaataacaccagcttttagaccctgcattgagaattcaggtgctttttcatcaacataataaattaaagtttgaccaggatccagatccagttgttccccatttactgtcaggtgccattttcttagaatgaaacaaggattcacctttaacatctttttcaaaataataagccacatcagctatgtccacatcattctgagntttttgagaagaattttgaaccagatcaatagtgataacattattctcatacaaaatactcgngataaattntgg

SEQ ID NO: 414 - DNA, 267 bp, Homo sapiens
accagaaaggcacacgattttacaatatttgttggaattaccttactttttaacctcctcatagcagttttggtttgagtatattgatgaaagccaaagtctggtatctaaaacttgggccaatgtttcccaactggtatatgtcaggctttcccaatagcttaactgtgaccctatacggatggctttttagatagttctatactgctgtattgtgttagcacttttctttgtcattaacaacacactttaaatgacatttggtga

SEQ ID NO: 415 - DNA, 454 bp, Homo sapiens
accggaacctgcagaaacagtgtgagaaattaagtcctggttcactgcgcagtagcaaagatggtcaaggccatggaaaaagcagaaatttaccaagaaagctgatacccatgtatagttcccactcatctcaaatacatctgctatctttttaagctaagtcctagacatatcggggataacatgggggttgattagtgaccacagttatcagaagcagagaaatgtaattccatattttatttgaaacttattccatattttaattggatattgagtgattgggttatcaaacacccacaaactttaattttgttaaatttatatggctttgaaatagaagtataagttgctaccattttttgataacattgaaagatagtattttaccatctttaatcatcttggaaaatacaagtcctgtgaacaaccactctttcacctagcagtatga

SEQ ID NO: 416 - DNA, 370 bp, Homo sapiens
ccgacacggtgccagcgccctgctgcgtgcccgccagctacaatcccatggtgctcattcaaaagaccgataccggggtgtcgctccagacctatgatgacttgttagccaaagactgccactgcatatgagcagtcctggtccttccactgtgcacctgcgcggaggacgcgacctcagttgtcctgccctgtggaatgggctcaaggttcctgagacacccgattcctgcccaaacagctgtatttatataagtctgttatttattattaatttattggggtgaccttcttggggactcgggggctggtctgatggaactgtgtatttatttaaaactctggtgataaaaataaagctgtctgaactg

SEQ ID NO: 417 - DNA, 463 bp, Homo sapiens
acactttatatattccaaattgatcagatatatggtttgcaaattcatctcaatctgtagcttatcttttcctcttcttaaatcacaagtttttaaattttgaagaagtccaatatatcagattttgtcttttatggatgtgctttcggggcaaagtccaagaacttgtcacctagcccaagatcctgaagatttttctcctgtggcttttttcaaagttatctagttttatgtatcacatttaagtccgttatacattttgagttaaattttatataagatgtgaggtttaagtagaggttcttttttctcctcgccatgggtgtctaattgctctagcataatttgtcagaaaggctattcttcctccattgaattgctttttcactttttcaaaatcagctgagcatatttatatgggtttatttctgggttctctcatctgttccattgacgtatgtgt

SEQ ID NO: 418 - DNA, 334 bp, Homo sapiens
ttagcatttgcttttatttttttactttgatgccttttcaaattggcatgtctttaaagtatttttcttcctgattaaaaatgtgtgtgtatgtgtgtgtgtgtgtgtatatatatatttttttaaatcacattaattttaccaagtgaaaccaagccatactgtttttgagccaattaagaaaattgccatttttaaagtgtagcatttcagggtaaagacccatgaaatggcttgatgtattctagactactgaaagaaaaccacttcaaagattttgttgaaagttttagtgttgtctgaaatgcaagagggaaggtgattggtagtgagt

SEQ ID NO: 419 - DNA, 297 bp, Homo sapiens
acttctttgaccaaggaataccacagacaccctaccgatagaacagtggctcagatcttacttgctcctgcttacgaagtattcccaatcactggtcatctgaccctacttgaacactcctgaacagtcatgttttttaaaatcttcctttatatcaagtcagagagtatacttctataaatttcactcatggatgttaggaaatctagtcatcttccctgtgattgccctgttaagtatttaaccatagctatcatgtgtttcccaaatcttctctagattaaatatcttcagtta

SEQ ID NO: 420 - DNA, 418 bp, Homo sapiens
acgagaggaaccgcaggttcagacatttggtgtatgtcctatcaataggagctgtatttgccatcataggaggcttcattcactgatttcccctattctcaggctacaccctagaccaaacctacgccaaaatccatttcgctatcatattcatcggcgtaaatctaactttcttcccacaacactttctcggcctatccggaatgccccgacgttactcggactaccccgatacatacaccacatgaaatatcctatcatctgtaggctcattcatttctctaacagcagtaatattaataattttcatgatttgagaagccttcgcttcgaagcgaaaagtcctaatagtagaagaaccctccataaacctggagtgactatatggatgccccccaccctaccacacattcgaaga

SEQ ID NO: 421 - DNA, 304 bp, Homo sapiens
acgcctggacccctgtgacttgcagcctatctttgatgacatgctccactttctaaatcctgaggagctgcgggtgattgaagagattccccaggctgaggacaaactagaccggctattcgaaattattggagtcaagagccaggaagccagccagaccctcctggactctgtttatagccatcttcctgacctgctgtagaacatagggatactgcattctggaaattactcaatttagtggcagggtggttttttaattttcttctgtttctgatttttgttgtttggggtgtgtgtgtgt

SEQ ID NO: 422 - DNA, 578 bp, Homo sapiens
actgtgcaggcagattcacagggtggtggtaaagcatccacaatggctctggcagcatcaggatcacacttgaaggggctctcagacaaagttgtattcatgcaactgattccttttccattcgttttcttagtcactaatgctttccaatggtcatgagtgcttttaataatatcaatggcaaagtccttatctttaaattctgcattaaacgcaaactcattttctggttttccatcaggaaccttataccttctaaaccagtccacagtagcttctaagtagccaggtttcagccgtttgacatcattgatatcattataattggctgcatcaggatcatccacattaatggcaatgactttccagtcggtttccccttcgtcaatcatagccaatatgcctagaactttcaattatttatttcacctcttgcacataccttgcttccaatttcacacacatcaattgggtcattgtcaccacaacagccagtatgtttatcattgtgccctgggtcttcccaagtctgagggatggcaccatagttccagatatatcctttatacgggaacaaa

SEQ ID NO: 423 - DNA, 327 bp, Homo sapiens
  misc_feature 309, 312: n = A,T,C or G
acagtatatttttagaaactcatttttctactaaaacaaacacagtttactttagagagactgcaatagaatcaaaatttgaaactgaaatctttgtttaaaagggttaagttgaggcaagaggaaagccctttctctctcttataaaaaggcacaacctcattggggagctaagctaggtcattgtcatggtgaagaagagaagcatcgtttttatatttaggaaattttaaaagatgatggaaagcacatttagcttggtctgaggcaggttctgttggggcagtgttaatggaaagggctcactgntgntactactagaaaaat

SEQ ID NO: 424 - DNA, 384 bp, Homo sapiens
acgaaaaataaatctccttaaaaactaaataaaatgcactgtattcttacagttaatgtttataactatagtaaaaaattaatatatatcctattacataaatgttatttcttaggtgttccattaagaagagcaatagaataatgctaaaaaataatgcctataaatcttcagagtataaagacatccattcagaaacaaaaattagcactaaattttttataaaatagaccagatgacaaaatttattttatttttaaacagtggttttgacacaaattatgttattgaaaagcattattaatgtttaatttatttaaaattttggaatttgccatttctcagagaatgatcaggccttaggaaattaatacagtagtagta

SEQ ID NO: 425 - DNA, 255 bp, Homo sapiens
actatcaggctttgtgctgatttcctgaacaaactgcattatattatgaaaacaaaaggaaaagaagaaataataaaaactatactcccatatttcacttacagtgtttgagttcctggaaggacctatataatggaggcagcattcaaacaagaaattatgccaatcaactgtcaaattttcactataattttcctaaaaaggcgtttttcccccaatatctattaatctcaaagaaacataagttgtgaatgt

SEQ ID NO: 426 - DNA, 196 bp, Homo sapiens
  misc_feature 8, 10, 11: n = A,T,C or G
acatgaantnnccaggcccacacagccagacagcaacagaaccaagacctagggctcttcactcctgttacatcacaccatggcaatgattttacattctccaactgattcaaatcatatggcagctagggatttgggggctccatgttttatttcaattgcaagttcaagatttctttttatctttgtgggctga

SEQ ID NO: 427 - DNA, 163 bp, Homo sapiens
acagaagatccatggaggcaagtgctgtcaggaaggacactgcctccctccaccctcccaaatgtcaccaccaagttccttcaggtgagacctcacacaatgtcaagtgctttctaggaaatactaagatcaggttgagagattctgcttggtctagtcaatc

SEQ ID NO: 428 - DNA, 315 bp, Homo sapiens
  misc_feature 1, 10: n = A,T,C or G
nactgagtanagatgctggggaatgtgcaatatgccttgaagaattgcagcagggagatactatagcacgactgccttgtctatgcatatatcataaaggctgcatagatgaatggtttgaagtaaatagatcttgccctgagcacccttcagattaagcgtcagcttcctgttttataggttttcttgtcttgacaagatgcttgaaaaaccaagaggatatgaaaatctgtctctggagaaacaaagacgcaggcatactcagccagaaatctgagttttgtgagacttggtaatacagagatggacaatcgt

SEQ ID NO: 429 - DNA, 131 bp, Homo sapiens
  misc_feature 10, 42: n = A,T,C or G
acagttaggnactagaacatttgttaagcctcccaaagtagngtgcatggaagattctagagtgtccagctcttgcactacaaatgtaataataacagaataaatacacttaccctgatgatattgagggt

SEQ ID NO: 430 - DNA, 503 bp, Homo sapiens
actgatttttaataaaagaaataaggttcaaagtttagcacaacaacacagcaataagaagctgacaacttggataaaaatacaagaaagtaacacagagcccaggctacccattatttactgtgtgcatacaggaatgctatacttcagatgtataaattagagactgattttaagttattaatttaactactttttgtccactgtgctaaactaaattttatactaatgtgctactgcgtaaacacttcaaagcaatcttcattaaaatgctgcaaagaaaaacaagaatacacatcatccaaaactaaggatgtcattgcagttcacagtttgtataataaataccctccctttcaatcactactaagatcactacatcctatctactcatcagcacaaccttgaagcaacttatacttacaaatattagcaatgcagccaaacatttgttttttgcaaagcaactagtaaaaatcaagaattttaattaagacggtgca

SEQ ID NO: 431 - DNA, 207 bp, Homo sapiens
acaagtgtggcctcatcaagccctgcccagccaactactttgcgtttaaaatctgcagtggggccgccaacgtcgtgggccctactatgtgctttgaagaccgcatgatcatgagtcctgtgaaaaacaatgtgggcagaggcctaaacatcgccctggtgaatggaaccacgggagctgtgctgggacagaaggcatttgacatgt

SEQ ID NO: 432 - DNA, 485 bp, Homo sapiens
  misc_feature 37, 43, 56, 59, 435, 438, 453: n = A,T,C or G
aaaaaaagtaatggaaaaatggttgcaggtttaatcncaaaangaacttaattttngtngattttgttttatctgctaaaacactaatatctataaatatgaactgacagcatcgttctaaatttacttctgaagagctgtcgagacttcaataaaatataagcaagttactggatcatatttatggactgctgaattaactacccgaaaagtatcagttactttcaaagaacacaaaacaaagtgaacgtggaaaaaagccttctttgcaaaagtccttttattagtcctatcctctaaaattccaagccacagagccttgatattcctggattctgttttaagtaaccttagttttaaatatgacacttgggatatgcacaatgggaaagggtaggatatgtgaacaaaatttaatttcttttttccaaaggnagncattttctttaaatncatcctatccacttttgcccacttccccatgt

SEQ ID NO: 433 - DNA, 280 bp, Homo sapiens
actgtcactacaatattacattctgcaaatgttattctgttgtatcagatacaaaattttagtgaggtatctctaaggcacatagtagaaaacaaaattggttaattactcaagttcctttcactgtgatttggaaatgatttaatctttatagaatgagaaccttttttggactagcttttttattaaaatggctcaatttgtgttgataaggattgcattaatatttaatagtgcttgcttttcctctgggcacaccattttgatcattaaccagagt

SEQ ID NO: 434 - DNA, 234 bp, Homo sapiens
ctttgctgcgcatcaggtgctttaagcttcggaacaactgtgcaggattctattttagtattctggaagcatcattgaggaagtagtccagtgaagttagctctaaaaaaactctttactctaacaattaaaagaaatatgccaaaggatccataagggatgaataaattattaaactattaagaagttgctataaatatgcagtgttaattcaataattcataacggactggt

SEQ ID NO: 435 - DNA, 330 bp, Homo sapiens
acctcccgtgtcaccagttcccacagaagcactgcaaaactccacatgtctgctgagcgtctgtttgtgtcttcaggcttcttctgcagagcttcgggggctacccaggcaggtgcatacatgcgaccaggacattggaaagagaacttgacatcagccatgctaattcgggcagtcatgtcctcatcaatcattacactacggctattgagtgcatgtcgtgggatgaggggctctagtgtgtgtaggaaagccatgccccttgccatgtccaaagcaaacttcacagcctggctctggtccacgacgaaattggtgccttcatgtagt

SEQ ID NO: 436 - DNA, 311 bp, Homo sapiens
acaactttacaatggaattgtatttcaatgattattttgatatcagattaaaccttccaaaaagttacacataattcaggtctattttttctaccagtaagagttctgctaaattacaaaaccccataatcacagtgttcagtttttaaaaaattaaacacacagtaatcctgtcaatgttaatcaaaatcaaaacttcggaatgccgtggcatttatgtgaccaatctgagttttagatacaaataccagctgtttatcccatgaaccatttttcctaggctgaggctgtgaaaaatcgaaagtcggcgt

SEQ ID NO: 437 - DNA, 355 bp, Homo sapiens
actagtggatgggggtcagggtgtcactccaaggccctctacagacccagagaagaggaaagtcaaaaaagccagatatgagactgctgaagtggtgttaagaaatataggcaaggtaaagggaacaagatctgggctccctcctacttgtgtccctcactggacctcagacaccctacctctaagactggttcttagaaggctgaacagtaaggagcattccaatagcttctgaaactcccaaggctgtttcaagtagtcgaaagccatccctggactgttcaggtgccttttctatttcccacctgagctctctgccctttctttgagcctcacaggtttccagaattacagt

SEQ ID NO: 438 - DNA, 431 bp, Homo sapiens
acagtaactttaactttacatagagctgagataaaaataaagctttcttacaaattacattttttttccagtgaattacttttgcagtaaaaatagctgctacataaatccctcctgatctctgaaaaggagttgcatatttccaaaaataatattcttattttaatcacacagaagaacgtggagcacaggaaggaaatggctgggtggtcagagagaggtgagctgtcggagaaacacagttaaactaaaaaataaaatccattttgtgtataaactgacttaaacgcatgcaaagaagtggaaaacatatgccatttgtcaagaaaaatactgctttatagcttttactttacaattaaaggagaaagcagaggccagatataagcccagataataacatttaagtttctcataaaactcccaaatgt

SEQ ID NO: 439 - DNA, 170 bp, Homo sapiens
actgtcataaaaaacagtggagctctgtattagaaagcccctcagaactgggaaggccaggtaactctagttacacagaaactgtgactaaagtctatgaaactgattacaacagactgtaagaatcaaagtcaactgacatctatgctacatattattatatagtttgt

SEQ ID NO: 440 - DNA, 400 bp, Homo sapiens
acgtaaaaagaacatccttcccatcttcaaggtcaagattgaacgctgactcctgcaggaagtcttccaggattcccaggcaggaatgatggctccctgtccctgtagctccaggagttcttgcttcacgcacgcctcacataccagactgaatgttggcaggaggagtgaccaggtcggtcatctgtgtccctaccacctacaacaggccagcaatctacccgtgtgtgtttgttggacagaattaaccatgatgggcggccgagggcgcctggagctatttgggggcttggagagaacctcttaggagagtgtcaggctctaggccagtgtcaccagaggaggtcagtctcagtccttggagtggtgggatggaaaccagacgggactggcatggtcc

SEQ ID NO: 441 - DNA, 204 bp, Homo sapiens
acctagttacttcttaagatcaggtgtataaaactgtggagtggagcggtatggtatggaatgacttggaatgtaagctgtcagggagaaaatgttgttacacttttgctaagatctgggggtttcttcatattcctgctgttggaagcagttgaccagaaatgcttgccagtactgccaaagcactgctgtgaaatgtgaagt

SEQ ID NO: 442 - DNA, 649 bp, Homo sapiens
acatttaattttttacaacattttctccctagagatataatttagatattcctatcttcaaagtaaaaatcaaaataggaaataagcatagaaacagcctattggcagtggttacacctgcatggtatttatgagtctccaaactattggaaatttatttcaaccaaggttctcttaagtcttcattacttgggtgtaactcgagagaaaactaatttatatcaatttacagtttagtggtcatgatcaggggaaagtgatactcttccactgactacaagtcattgcagaggcagtttagaacttttcctttattcctaatatacaggacaaaccttgccgacatctcactacctcaaaaatcaaatttaaatgaagtatccaggagtagcctaaagaatgagtgtaatctggatggattttagtctaaatttatgccttgctcttcagtaaagtatagtaactccagatatatgttccacagatgcaataatttctgttccttgttcggtgcagaatataatttatacttcctgaaatcaactttgtctattcatgaaaatagctgctttttatttgcctttgtctcactttgaatatatatgatccacaggttacagacttttccaataactacatttcaacttgt

SEQ ID NO: 443 - DNA, 346 bp, Homo sapiens
acgtgggattgaaatgcacatacatgtttttgctaagagcacatacatttcattctcctcactttgttcataacctcagcattgtcagataacctcagtgagttaactcaaagccttttattatggaaagaactggcacagttacatttgccagtggcaacatccttaaaaattaataactgatgggtcacggacagatttttgacctagttcctttttcttttagagcaaaaagaacttttacctcggcatccagcccaacccctaaagactgacaatatccttcaagctcctttgaaagcaccctaaacagccatttccattttaatagttggatgcggattgt

SEQ ID NO: 444 - DNA, 425 bp, Homo sapiens
accaatttccttttacagtaaaggggcttttcctgttgcttgttgaaccggttcccagctgcccattaccaccaagcccaaaagagtaaattcgtcctgatgaaggaacaaaagcagaagtgtgctgccgtccacaagcaatctcagtgacaatgcttcccataagttcaaaaactttccttgggtttatttcatgactggtagaattatggcccaactgaccataccctccagctccaaaagtaaacactccaccttccttggttagagcagcagtatgatcttctccacaacaaatataaactattttctgagatcttagtgactttagtaaattaggaacatacctatcattttcatcattaagacctagctgaccaaacttgttgcgtccccatccaaagatagctccagaaagggtgagt

SEQ ID NO: 445 - DNA, 210 bp, Homo sapiens
  misc_feature 1: n = A,T,C or G
nactgtcccaatataaaacagtaattatttgacctttgcactgtttgtctggtccttttcagtttgattgcatataaatgtggaacttgatagatctctatatttttaatgcacttgtgataaactggcagcagggttagacattactttcaaagcttgaggtagaccgagtcagcatgctagacaggcttctctctctaaccaaaactg

SEQ ID NO: 446 - DNA, 326 bp, Homo sapiens
tcgaaagacccctgtaaaagagcccaacagtgaaaatgtagatatcagcagtggaggaggcgtgacaggctggaagagcaaatgctgctgagcattctcctgttccatcagttgccatccactaccccgttttctcttcttgctgcaaaataaaccactctgcccatttttaactctaaacagatatttttgtttctcatcttaactatccaagccacctattttatttgttctttcatctgtgactgcttgctgactttatcataattttcttcaaacaaaaaaatgtatagaaaaatcatgtctgtgagttcatttttaaatgt

SEQ ID NO: 447 - DNA, 304 bp, Homo sapiens
  misc_feature 1, 3, 6, 31, 34, 35, 79: n = A,T,C or G
ncntcnaggtacatgctagaagtctgatgtngtnngtaacacagaaacatacacagtcttcatattcaaagtcttcacngggatgtcgttctgtaatttcctgcgtttgggtctcttccagaaacagctttagcttcctgctccgaaggccaaacaccttggctgcttcatacagaagaccttggtgggtgagtccattctgcccaagtgggttttcaagcaggagagtgcccactgtccccattaaacactcttgtggctttgcattcaggagctgtaggttgatatactgacaaggaagagt

SEQ ID NO: 448 - DNA, 203 bp, Homo sapiens
acatgaaagcggcaatgcggtaaaaagcgaattcttacccaaggtcagaattttttattaagcgcattttcattagttggacaaacaaccttataaacccttatgtcaaaccatataatgtgaagaatctccatgggagagattttttttcacccttcagaattatctttttcccctaagaccttcatatgaatcttccttgt

SEQ ID NO: 449 - DNA, 481 bp, Homo sapiens
  misc_feature 458: n = A,T,C or G
acttgttctataatactctgatgtttccttaaattcctgaacaacattctgtttactaaatttcttttcttcctttattcacaccaaattccaccctataatagaagctaattatttcagaaagctttttagtgatcatttattactttgtgtttactagatattaattctaagatgaattcctttagaattttagaaaaaattattctagacaacaatcaaagtaaaggatacatccagcattgaaaccataagccggcaagtctccaggttaaaaggtttgtatcctccagcaatgccagactgtgtcagacatctctgcaattcatcagcatctatctgcccatcctgtccagctacagcagcaaagtaaccatacagcggatcctgagtttgtccgggaaacgcaggccctccgggagcccctccatactgcatcttgagttgaagtcttatangtagaagctggtgatccttagag

SEQ ID NO: 450 - DNA, 296 bp, Homo sapiens
acatggtttaatacaacaacaaaaaaatttaatcaagtgaaacgtaataaactgaacaataaacactcaaaacattttccattggaaacatgtaaagacaatatgaggttttgttaccatcttactgcaattttcttatgtgttactagtctacataccccatgttttctgtaatcatgcagatgtgaatggaagtttgaatgattaaataaatgaaaagtccgtttactgcagggaatcatttcacaaggcagccaaaccgggtttagagaacaaaactattcaagaaattctcc

SEQ ID NO: 451 - DNA, 294 bp, Homo sapiens
  misc_feature 6, 20, 198: n = A,T,C or G
acatgntccaaggcacgcgnctgtgaacttcctctgagtgaaggcatcccctccagcacctttcagcctgctagttaggacgacccgccgccaccctccaggacctccagccctgcactgcctttcctctcttttaaataattcttcattgagttctaatatgtaaaaaaaaagtttactgtaaagtttgcaaataangaaattttttttaaaagtcctcagtaatcttaccagtaacaattgttatgggcacatttgcttttggaagatttcttttgtatgcatgggataagt

SEQ ID NO: 452 - DNA, 129 bp, Homo sapiens
acttttagatcacaaatttgcctttaagtaacacataatacacttaaggcagatttgccttacaggtggcctcagcttctaaacaccactacactgctttatataaaaaacaaaaatcacatagaagag

SEQ ID NO: 453 - DNA, 151 bp, Homo sapiens
  misc_feature 9, 10, 44, 46, 47, 150: n = A,T,C or G
actctcaanntgtatttaggtgccaacacatttaggatcattgngnnttctcagtgaattgacctttttatgagaataaaatgtctatttctgaaatgtccctatttctggaaatgttccttatactaaagtccaacttgtgtggattant

SEQ ID NO: 454 - DNA, 119 bp, Homo sapiens
  misc_feature 9: n = A,T,C or G
tgctgatgnagcatgctttttaaatcctttaaaaacactcaccatataaacttgcatttgagcttgtgtgttcttttgttaatgtgtagagttctcctttctcgaaattgccagtgtgt

SEQ ID NO: 455 - DNA, 515 bp, Homo sapiens
accttataaagttccttttcatccttctctgtcttcaactgacattcaagttgttctctttcatgttgtgccttcttgagtttggcctttaaactgtctaattcggtttctttttcaattgctttatgtgttactgacacaatatcttcctcaagctgatgggctttggatgtagcatcactgaacctcttcttaaactcttcattttccatttttaagctttgtgttacttcagtaagacccttttgttctgcttgcagttggtcacatctttctttctcatggttaagttctctttccattctcccaacttgttctcgaagttgtgctgtttctttttccagaacggcaattaactttaacagttcttctttttctttcatggttttctcaattttcaactcaagaaggcctgcttttgtggtcaccactaacatgtcagaatttccttcatcttccatagtaagcagctcttcaactggagaagaagctcgaaactggaaaggtgtacctgc

SEQ ID NO: 456 - DNA, 350 bp, Homo sapiens
  misc_feature 310, 326: n = A,T,C or G
actcccctccccaaatagaaacctcaaagactgatccatttcccctagggcctgggccaggagtagctcactgctcactgctgaggagaaaggcacaagatataatgtcataagagcaggacagtggctcagcctacagagttccctataggggaaagaaggcaggaaataggcgcagggtctggtcctgtccctgcaccaccctgagcagctagtcttgggaagggattacaggccctgggccataggctgctcgccattctgctttcctatcctgtttctctccctgtgctgctcccttttagccagngctgagaaatgttcancacctgaggcaaaactgccatagt

SEQ ID NO: 457 - DNA, 293 bp, Homo sapiens
gcagggccaacagtcacagcagccctgaccagagcattcctggagctcaagctcctctacaaagaggtggacagagaagacagcagagaccatgggacccccctcagcccctccctgcagattgcatgtcccctggaaggaggtcctgctcacagcctcacttctaaccttctggaacccacccaccactgccaagctcactattgaatccacgccattcaatgtcgcagaggggaaggaggttcttctactcgcccacaacctgccccagaatcgtattggttacagctggt

SEQ ID NO: 458 - DNA, 500 bp, Homo sapiens
actagactccagattaccctttcttaataaatatctcagggtaaggaaagaaagaaactgtatagatatatttaaaatagagaatactttccaagcaatacatgatgcctttcctaaaagactctaaaagaaaaagattctgtaactctcttttagcaccaaattattgtttatcttgctggatattttatatgaacagtgttaatttagatgcactaaagcaaaggtaggcaaactacaaccatgagtcaaacatggccacacccattcatttgctattgtctaagctggttttgcactacaactgcagagttgaatagatgcagcagatcctttacagaaaaagttttctgacctcaattctaaagtaattgtagtagggagctggaggactttctttccctttatggtaattttttgagctacaaaaagagccttgcagaaatgggtgaagggattaatcttttaaaaataaatgctatatattaggaaaataaaaa

SEQ ID NO: 459 - DNA, 394 bp, Homo sapiens
ggtgaaaagacttgattttttgaaaggattgtttatcaaacacaattctaatctcttctcttatgtatttttgtgcactaggcgcagttgtgtagcagttgagtaatgctggttagctgttaaggtggcgtgttgcagtgcagagtgcttggctgtttcctgttttctcccgattgctcctgtgtaaagatgccttgtcgtgcagaaacaaatggctgtccagtttattaaaatgcctgacaactgcacttccagtcacccgggccttgcatataaataacggagcatacagtgagcacatctagctgatgataaatacacctttttttccctcttccccctaaaaatggtaaatctgatcatatctacatgtatgaacttaacatggaaaatg

SEQ ID NO: 460 - DNA, 279 bp, Homo sapiens
  misc_feature 4: n = A,T,C or G
actnccgattgaagcccccattcgtataataattacatcacaagacgtcttgcactcatgagctgtccccacattaggcttaaaaacagatgcaattcccggacgtctaaaccaaaccactttcaccgctacacgaccgggggtatactacggtcaatgctctgaaatctgtggagcaaaccacagtttcatgcccatcgtcctagaattaattcccctaaaaatctttgaaatagggcccgtatttaccctatagcaccccctctagagcaaaaaaaa

SEQ ID NO: 461 - DNA, 278 bp, Homo sapiens
tttggacactaggaaaaaaccttgtagagagagtaaaaaatttaacacccatagtaggcctaaaagcagccaccaattaagaaagcgttcaagctcaacacccactacctaaaaaatcccaaacatataactgaactcctcacacccaattggaccaatctatcaccctatagaagaactaatgttagtataaagtaacatgaaaacattctcctccgcataagcctgcgtcagattaaaacactggactgacaattaacagccaatatctacaatca

SEQ ID NO: 462 - DNA, 556 bp, Homo sapiens
aacgtccaagggggccacatcgatgatgggcaggcgggaggtcttggtggttttgtattcaatcactgtcttgccccaggctccggtgtgactcgtgcagccatcgacagtgacgctgtaggtgaagcggctgttgccctcggcgcggatctcgatctcgttggagccctggaggagcagggccttcttgaggttgccagtctgctggtccatgtaggccacgctgttcttgcagtggtaggtgatgttctgggaggcctcggtggacatcaggcgcaggaaggtcagctggatggccacatcggcagggtcggagccctggccgccatactcgaactggaatccatcggtcatgctctcgccgaacccgacatgcctcttgtccttggggttcttgctgatgtaccagttcttctgggccacactgggctgagtggggtacacgcaggtctcaccagtctccatgttgcagaagactttgatggcatccaggttgcagccttggttggggtcaatccagtactctccactcttccagtcagagtggcacatcttg

SEQ ID NO: 463 - DNA, 659 bp, Homo sapiens
cacactgtgcccttccagttgctggcccggtacaaaggcctgaacctcaccgaggatacctacaagccccggatttacacctcgcccacctggagtgcctttgtgacagacagttcctggagtgcacggaagtcacaactggtctatcagtccagacgggggcctttggtcaaatattcttctgattacttccaagccccctctgactacagatactacccctaccagtccttccagactccacaacaccccagcttcctcttccaggacaagagggtgtcctggtccctggtctacctccccaccatccagagctgctggaactacggcttctcctgctcctcggacgagctccctgtcctgggcctcaccaagtctggcggctcagatcgcaccattgcctacgaaaacaaagccctgatgctctgcgaagggctcttcgtggcagacgtcaccgatttcgagggctggaaggctgcgattcccagtgccctggacaccaacagctcgaagagcacctcctccttcccctgcccggcagggcacttcaacggcttccgcacggtcatccgccccttctacctgaccaactcctcaggtgtggactagacggcgtggcccaagggtggtgagaaccggagaaccccaggacgccctca

SEQ ID NO: 464 - DNA, 695 bp, Homo sapiens
accttcatttgaccccatcagcttcagggccttctttacatttccactggcctgatccatgtatgcaatgctatttttgcagtgatatgtgatgttctgggaagctcggctggagagaagtcgaaggaatgccagctgcacatcaaggacatcttcaggaagttcaggattgccgtagctaaactgaaaaccaccatccatggactctccaaaccaaacgtgtttcttctcagcactagaatctgtccaccagtgtttccgtggaacattcaaaggattggcacttatgcatgtttccccagtttccatattacagaataccttgatagcatccaatttgcatccttggttagggtcaacccagtattctccactcttgagttcaggatggcagaatttcaggtctctgcagtttctagcggggtttttacgagaaccatcaggactaatgaggctttctatttgtccattaacagacttgagtgaagtcataatctcatcggtgttgattttgaaatccattggttcatctccataatacggggcaaaaccgccagctttttcacctccaatcccagcaatggcagcggctccaacaccaccacagcaaggaccaggggcaccaggaggtccaggagggcctggttgccctgggtggcctggggagccctcagatcctctttcacctctgttac

SEQ ID NO: 465 - DNA, 73 bp, Homo sapiens
caggtccagagctcccaggtttccaggttgcagtccctccagtcccagagctcccagggtttcggtttccagt

SEQ ID NO: 466 - DNA, 507 bp, Homo sapiens
  misc_feature 15, 453: n = A,T,C or G
agcactggcagaggnagccaaatatagtgatgtgcgccagagataagtattctcctctccaagcatattgctatacaagactttaaagacttcataaaagccaaacttgcagagtccctgcatggagtagccaaggaaagtcggagcccatcctttagccaaaccacgaacaccatcctctttaagtgtaactgagaatccgttaaatatgcccttgtacttttgggggtccacctgcatacggcatttcactaaatccaggggaaccacagcagtgtgtgtcagaccacaacttaagaccccaccaaagccacacagtgcataatacttcgcggagccaaattcacaactgtactcttccacggcggcggctgccaggttgcgagggcggcggggctggcccgtgggccctggggagctgctgcggaggtccccgagaccatcgtgcaccanctgcagatgtggcgtgttgaaggggttcgcccgcgccaggtgcgccacggacga

SEQ ID NO: 467 - DNA, 183 bp, Homo sapiens
cctcatgagctaccgggccagctctgtactgaggctcaccgtctttgtaggggcctacaccttctgaggagcaggagggagccaccctccctgcagctaccctagctgaggagcctgttgtgaggggcagaatgagaaaggcaataaagggagaaagaaaaaaaaaaaaaaaaagggcggccg

SEQ ID NO: 468 - DNA, 129 bp, Homo sapiens
  misc_feature 29, 81, 84, 90, 108, 110, 123, 128: n = A,T,C or G
gcggccgcgtcgaccggcgccgtcgggcnccgggccgggccatggagctgtggacgtgtctggccgcggcgctgctgttgntgntgctgntggtgcagttgagccgcncngccgagttctacnccaang

SEQ ID NO: 469 - DNA, 243 bp, Homo sapiens
  misc_feature 15: n = A,T,C or G
gcggccgcgtcgacnggccatggagactgtggcacagtagactgtagtgtgaggctcgcgggggcagtggccatggaggccgtgctgaacgagctggtgtctgtggaggacctgctgaagtttgaaaagaaatttcagtctgagaaggcagcaggctcggtgtccaagagcacgcagtttgagtacgcctggtgcctggtgcggagcaagtacaatgatgacatccgtaaaggcatcgtgctg

SEQ ID NO: 470 - DNA, 452 bp, Homo sapiens
cctcaagtacgtccggcctggtggtgggttcgagcccaacttcatgctcttcgagaagtgcgaggtgaacggtgcgggggcgcaccctctcttcgccttcctgcgggaggccctgccagctcccagcgacgacgccaccgcgcttatgaccgaccccaagctcatcacctggtctccggtgtgtcgcaacgatgttgcctggaactttgagaagttcctggtgggccctgacggtgtgcccctacgcaggtacagccgccgcttccagaccattgacatcgagcctgacatcgaagccctgctgtctcaagggctcagctgtgcctagggcgcccctcctaccccggctgcttggcagttgcagtgctgctgtctcgggggggttttcatctatgagggtgtttcctctaaacctacgagggaggaacacctgatcttacagaaaataccac

SEQ ID NO: 471 - DNA, 168 bp, Homo sapiens
  misc_feature 18, 37: n = A,T,C or G
cttctccgctccttctangatctccgcctggttcggnccgcctgcctccactcctgcctctaccatgtccatcagggtgacccagaagtcctacaaggtgtccacctctggcccccgggccttcagcagccgctcctacacgagtgggcccggttcccgcatcagctc

SEQ ID NO: 472 - DNA, 479 bp, Homo sapiens
  misc_feature 71, 87, 182, 218, 288, 322, 358, 386, 407, 423, 429, 473,479: n = A,T,C or G
gccaggcgtccctctgtctgcccactcagtggcaacacccgggagctggtttgtcctttgtggagcctcancagttccctctttcanaactcactgccaagagccctgaacaggagccaccatgcagtgcttcagcttcattaagaccatgatgatcctcttcaatttgctcatctttctgngtggcgcagccctgttggcagcgggcatctgggtgncaatcgatggggcatcctttctgaagatcttcgggccactgtcgtccactgccatgcagtttgtcaacgngggctacttcctcatcgcagccggcgttgtggtntttgctcttggtttcctgggctgctatggtgctaanactgagagcaagtgtgccctcgtgacgntcttcttcatcctcctcctcntcttcattgctgaggntgcagntgctgaggtccgccttggtgtacaccacaatggctgagcccttnctgacn

SEQ ID NO: 473 - DNA, 69 bp, Homo sapiens
gagcgatggagcgtgggtagggagggtccacagtgtccactcgccgtgtgcgaaggttgactcggtagt

SEQ ID NO: 474 - DNA, 155 bp, Homo sapiens
gccgccactgccgggagagctcgatgggcttctcctgcgcgccgcccggtgtctggccgagtccagagagccgcggcgcctcgttccgaggagccatcgccgaagcccgaggccgggtcccgggttggggactgcaggggaaggcagcggtggcg

SEQ ID NO: 475 - DNA, 282 bp, Homo sapiens
ggcttcgacgttggccctgtctgcttcctgtaaactccctccatcccaacctggctccctcccacccaaccaactttccccccaacccggaaacagacaagcaacccaaactgaaccccctcaaaagccaaaaaatgggagacaatttcacatggactttggaaaatatttttttcctttgcattcatctctcaaacttagtttttatctttgaccaaccgaacatgaccaaaaaccaaaagtgcattcaaccttaccaaaaaaaaaaaaaaagggcggccg

SEQ ID NO: 476 - DNA, 434 bp, Homo sapiens
ctccaggacagcgtccagcttggtgtcgttgaagacgaagtggagcggatggttgtagaaacgagtgatggtgctgagcggcgtgcagtcttcgggatccacgaaggccaagtccttgaggtagagcatgtccacgatgttggagcgctcctcctcgtacaccgggatgcgcgtgtggccgctctgcatgatgctggccaggacgccgaagtccagcacggtgctggcgtccagcatgaagcagtcttcgaggggcgtgagcacgtcctccacggtccggcagcgcagcacgcccttgctgagatcgctgtaggggtcgccgccgccgcgcgccagctccagcacccgctcccgcagccgcccgggccgcgccgccagctccagcagctgccccacgggcagcgcgacgggcagagtgagcaggacggccaggc

SEQ ID NO: 477 - DNA, 314 bp, Homo sapiens
ggcgggcgctagctggctccgggcagctcggccttgggggcttcggggccccgagacgcggggcgtatgagtggggcgtgcgctccacgcggaagtcggagcctcctcccctggatagggtgtacgagatccctggactggagcccatcacctttgcggggaagatgcacttcgtgccctggctggcgcggccgatctttccgccctgggaccgcggctacaaggacccaaggttctaccgctcgccccctcttcacgagcatccgctgtacaaagaccaggcctgctatatctttcaccaccgttgccgcctt

SEQ ID NO: 478 - DNA, 317 bp, Homo sapiens
aacagagtgatcattccagttaagcggggcgaagagaatacagactatgtgaacgcatcctttattgatggctaccggcagaaggactcctatatcgccagccagggccctcttctccacacaattgaggacttctggcgaatgatctgggagtggaaatcctgctctatcgtgatgctaacagaactggaggagagaggccaggagaagtgtgcccagtactggccatctgatggactggtgtcctatggagatattacagtggaactgaagaaggaggaggaatgtgagagctacaccgtccgagacctcctggt

SEQ ID NO: 479 - DNA, 171 bp, Homo sapiens
aggtgctttgctagatgctgtgacaggtatgccaccaacactgctcacagcctttctgaggacaccagtgaaagaagccacagctcttcttggcgtatttatactcactgagtcttaacttttcaccaggggtgctcacctctgcccctattgggagaggtcataaaatgt

SEQ ID NO: 480 - DNA, 65 bp, Homo sapiens
cccccagtggaaggctcccaccctggtagatgaacagcccctggagaactacctggatatggagt

SEQ ID NO: 481 - DNA, 207 bp, Homo sapiens
cacagcgtgctctgcggggtcactcccactttgttagtgatgtggttatctcctcagatggccagtttgccctctcaggctcctgggatggaaccctgcgcctctgggatctcacaacgggcaccaccacgaggcgatttgtgggccataccaaggatgtgctgagtgtggccttctcctctgacaaccggcagattgtctctggat

SEQ ID NO: 482 - DNA, 319 bp, Homo sapiens
  misc_feature 252, 258, 268: n = A,T,C or G
cacactgtgcccttccagttgctggcccggtacaaaggcctgaacctcaccgaggatacctacaagccccggatttacacctcgcccacctggagtgcctttgtgacagacagttcctggagtgcacggaagtcacaactggtctatcagtccagacgggggcctttggtcaaatattcttctgattacttccaagccccctctgactacagatactacccctaccagtgcttccaaactgcacaacacccnagcttnctcttccagnacaagagggtgtcctggtccctggcctacctccccaccatccagagctgct

SEQ ID NO: 483 - DNA, 233 bp, Homo sapiens
  misc_feature 212: n = A,T,C or G
acaggcccagtggcgcctagccttcagctgctgggctctcccgagcctgccttagcccatacaaccacttgatcacgcgggcattgcgctccaccaccgacacgccatagggaacgcgctcccgggcccgctcctcaacagtcaccgagctgcggcgggagcagcccccttcagagctgcccggcccagcactgggccctgccagggacacnatatccgagctggcccgtgcc

SEQ ID NO: 484 - DNA, 194 bp, Homo sapiens
agagcccttgctggggggtgcctgggagatggggtaagaagagctttcatttgtctggtagatagatagcatgtaagggggtggttgtcccaggaggcagctgctgacaggtttgctacacacagccccggactgtgttgcctgggtgctcattcagagaggggctatcatctgggagcctgtgcccctgggtc

SEQ ID NO: 485 - DNA, 67 bp, Homo sapiens
tccatatccaggtagttctccaggggctgttcatctaccagggtgggagcctcccactgggggaagt

SEQ ID NO: 486 - DNA, 70 bp, Homo sapiens
taccgagtcaaccttcgcacacggcgagtggacactgtggaccctccctacccacgctccatcgctcagt

SEQ ID NO: 487 - DNA, 257 bp, Homo sapiens
actcccgattgaagcccccattcgtataataattacatcacaagacgtcttgcactcatgagctgtccccacattaggcttaaaaacagatgcaattcccggacgtctaaaccaaaccactttcaccgctacacgaccgggggtatactacggtcaatgctctgaaatctgtggagcaaaccacagtttcatgcccatcgtcctagaattaattcccctaaaaatctttgaaatagggcccgtatttaccctatagt

SEQ ID NO: 488 - DNA, 378 bp, Homo sapiens
actctgctatggtgctggcttcctttaaactcaggatagatgccaggtgggctccgtttccgtaagactgacactcgagctcggcatcagaccagttcctcagcttcctgaagtaaccatagcaattggacttgtggtaaaaccatccaggagcacagctgggtctcatgatgatatcacccaggactcctgttttggccaggcagctcagcaataggagcagccgcatgcttctggaagccatcttcctcctaccctgaggatgtagctagtgcaaggatctcagagaccttactagcgcttctttgaaactcctgggttctccttgatctgcaaatctgtytggcaaccaagactctaagggcccctgccttcttc

SEQ ID NO: 489 - DNA, 429 bp, Homo sapiens
ccgaggtacacagaagtttgaatcacaaaacataattaccacaataaaacacagtgttcaagtatcttggcagagcaatctgccgcacaaactgcaaattaaattaactacacagactaaaaactatacagcctaccatcaacagttgtgcattataaaaaggtagtttctttccttttgttttaagtcaggaacaggtagatttttaaaaatatatatacaagctaacacacacrgctatcagcactaatgcccccccctcaacttttcctttttcttatagaaaatggaaagcttacaatacctcstcsrtymwrgmrscagrcctwcgagccwgcctgrasagggtkwgcmktggarmagmtstgkcctgaggtttagagccgctttgtgcggggatggtggaggctagggtgggggtgagaaaag

SEQ ID NO: 490 - DNA, 532 bp, Homo sapiens
ttggattgccacacggctcacattgcatgcaagtttgctgagctgaaggaaaagattgatcgccgttctggtaaaaagctggaagatggccctaaattcttgaagtctggtgatgctgccattgttgatatggttcctggcaagcccatgtgtgttgagagcttctcagactatccacctttgggtcgctttgmgktgtgatatgagacagacagytgcggtgggtgtcatcaaagcagtggacaagaaggctgctggagccggcaaggtcaccaagtctgcccagaaagctcagaaggctaaatgaatattatccctaatacctgccaccccactcttaatcagtggtggaagaacggtctcagaactgtttgtttcaattggccatttaagtttagtagtaaaagactggttaatgataacaatgcatcgtaaaaccttcagaaggaaaggagaatgttttgtggaccactttggttttcttttttgcgtgtggcagttttaagttattagtttttaaaatcagtacctc

SEQ ID NO: 491 - DNA, 567 bp, Homo sapiens
tcgaggtacaaaagcccttcaaaaggagttcagcttttataaacaccaaaacactctctgcctgtaaaatgtttttgctgaaatttgtatcattaactctcaaatttacatcttcatgtttgagatacgcttttaggactgtctatgcatgtagactttggtcaactctctcctcctccctcaataaatcagttaacttaaaaaatatattgtgaccatttttataaaatacatgttcataaaacagatcaacatatttagcttatacagaaataaaattaagtcaatccactcacaaagaatttctattttgtaaaaatgtagcttgtatttcagtataataaaatctgatgcaaaaaacctgcccgggcggcaagtgtgctggaattctgcakatatccatcacactggcggscgctcgagcatgcatctagagggcccaattsgccctatagcggcgcattaagcgcggcgggkgtggtggwtacgcgcasygtgaccgmtacacttgccarcgccctagmgcmcgctcctttcgcwttcttcccttcctytctcgccacgttc

SEQ ID NO: 492 - DNA, 422 bp, Homo sapiens
agtgtgctggaattcgcccttggccgcccgggcaggtacaagactcaataatcacctgactgagctccaattaactgaggagaaacggggtggaggagagggctggttgctattcagacttgataatgagattgatctgtcccatggagagtgaaagttcagttccacttctgcctccttctttccatgctgtcctcatgctctttatcctcacttcctcagtcccttcaacactcaaaatctgattttatttctctctcacacgtatcaggggcagtttctgaagttgctgaggttgaattttcttcacaaacctctataaaacatcagcagagaacatataaatacattttgattagcatacattgcaaaatttctcccacaatgtcaggggatgaaagcaggtggtccccactgagagt

SEQ ID NO: 493 - DNA, 318 bp, Homo sapiens
  misc_feature 283, 311: n = A,T,C or G
agtgtgctggaattcgcccttagcggccgccctggcaggtaagctttttttttttttttttttttttgatgattaacatctttaattcaaatgkaaaagttcaatacaagccatttatagggcttgagatttgttggtcttttaaaaacaaraaatggggaaatgcaacaaaatgacctttccacttttcaaaagctttcaagtaaaggatagatcatagggccataaaagatccatttaatsaaacccacttttyaccccctaccaattgtcttacacccantccacaatcttaatacatattcctgaanatttaca

SEQ ID NO: 494 - DNA, 360 bp, Homo sapiens
accttttactacaacaagtaaacatgcataataaagtaggattcatccaatgtctgacctttctttgcatcaaaagaacatttccggccaggcacggtggctcacgcctgtaatcccagcactttgggaggccgagccaggtggatcacgaggtcaggagatcgagaccagcctggctaacatggtgaaaccctgtctctactaaaaatacaaaaatgagccgggcatggtgggggggcaccgtagtcccagctacttgagaggctgagacaggagaatggcgtgaacccggggggcggagcttgtagtgagccgagatcgcgccactgcactccagcctgggtgacagagtgagactcc

SEQ ID NO: 495 - DNA, 329 bp, Homo sapiens
  misc_feature 269: n = A,T,C or G
gaggtctgggatggggcttcactgctgtgacttcctcctgccaggggatttggggctttcttgaaagacagtccaagccctggataatgctttactttctgtgttgaagcactgttggttgtttggttagtgactgatgtaaaacggttttcttgtggggaggttacagaggctgacttcagagtggacttgtgttttttctttttaaagaggcaaggttgggctggtgctcacagctgtaatcccagcactttgaggttggctggganttcaagaccagcctggccaacatgtcagaactactaaaaataaagaaatcagccatgaaa

SEQ ID NO: 496 - DNA, 292 bp, Homo sapiens
  misc_feature 166: n = A,T,C or G
acctgggatgaggtgggtggagctttgaatctaccactatccaggccacacacctagaagctctggtttcattgtttcattgatttcattgttttgattgatgctgaccttaggcagcagagttttcaatgctctccaggtgtttctaaagtgcagacaagtttangaccgtgcttgagggtgaagggcaggactgtgatggggaggggcaaatatggggcccttggggtgcaggcaatggttttccttgacctgaatgggggtctcacaggtgttgcatatacatatacgt

SEQ ID NO: 497 - DNA, 549 bp, Homo sapiens
tcgaggtaccgaccatagagcaagaatcaagattctgctaactcctgcacagccccgtcctcttcctttctgctagcctggctaaatctgctcattatttcagaggggaagcctagcaaactaagagtgataagggccctactacactggcttttttaggcttagagacagaaactttagcattggcccagtagtggcttctagctctaaatgtttgccccgccatccctttccacagtatgcttcttccctcctcccctgtctctggctgtctcgagcagtctagaagagtgcatctccagcctatgaaacagctgggtctttggccataagaagtaaagatttgaagacagaaggaagaaactcaggagtaagcttctagcccccttcagcttctacacccttcggccctctctccattgcctgcaccccaccccagccactcaactcctgcttgtttttcctttggccatgggaaggtttaccagtagaatccttgctaggttgatgtgggccatacattcctttaataaaccattgtgtacctgc

SEQ ID NO: 498 - DNA, 412 bp, Homo sapiens
cttgaagctgggaggtggaggttgcagtgagccgagatcacaccactgtactccagcctgggcaagagaatgaaactctgtctcaaaaacaaaaataaaaacaaaaaaaaaactcttgtcattctggaaatgtccacaattcagtcttcacctgcctccatcctcatgaaggcaccaggggagcgcggtgggctcacctgatttcttggttaggtctgttctgttccttttttatgcggggtctgtcggtgggcactgctccaatgtgaggggtccaggctccatcgtagcctcttaaccagctcagtgccaggaagggtggactttgacaaaaacccacctcaaatctgcactccccaacctggagtgcaacctgtggcaagctccctaggctctctgggcctcagcttcc

SEQ ID NO: 499 - DNA, 447 bp, Homo sapiens
acttttaagaatatactttgatttaatatgtatgttagtaaaactccacgtgttgtaaccattattatgtttttgtttttaaaatggggatgtaatactaataaccactacctataaaataaagcacacaattgttccggcgattttacaaatctttttttccaggtgtaaagtctacaaaaattccaaaaaattagagaacactgaaaacatattaaagtttgacatccaactttatagtatttccatgttaccctgaaagataacttaaaaaatatggccttcttagaacaggccactctgctattataaaaaattggtgacagcaagaaattgtatcactgatatgtggaatttttgtaaatagttttctctccaaatcattagaaaaatgttcaaaaataaaaacaaaataaaatatggtggtggtccctaaactattttgaa

SEQ ID NO: 500 - DNA, 527 bp, Homo sapiens
gtttgcttcttgcatctgattaactagaatatttctctttcccccttttaatttgtgatgtcacttgaccccatttatgtgtaggagcactacaccattggtttccaatactgcacacataagatacatacttgtgtgcagaaagtatcttcctccaggcttgtaatacccttcacatggaagattaatgagggaaatctttatattctgtataaaaacaaaagcaaatttatatactaaaatcatttgtctaaaaatttaagttgttttcaaataaaaattaaaatgcatttctgatatgcactgattgtgttgcctccagctttttttgctctctatgagtgactacttaagtcacttgttgagagggattatttactaattatatacttctcattcctgtaactccattccctttaaacagtggtgatatcaaatatacttccatccattgaatggggtatttttaacaacaacaaaagtgatatactaaaaaatgtattgcttaaggcttattgaatcatttt

SEQ ID NO: 501 - DNA, 304 bp, Homo sapiens
gaggttgccgaccaaagagaccattgagcaggagaagcggagtgaaatttcctaagatcctggaggatttcctacccccgtcctcttcgagaccccagtcgtgatgtggaggaagagccacctgcaagatggacacgagccacaagctgcactgtgaacctgggcactccgcgccgatgccaccggcctgtgggtctctgaagggacccccccccaatcggactgccaaattctccggtttgccccgggatattatagaaaattatttgtatgaataatgaaaataaaacacacctcgtggcaa

SEQ ID NO: 502 - DNA, 425 bp, Homo sapiens
actgattgtcatcctgactttggcattggcagctcttatattccgacgaatatatctggcaaacgaatacatatttgactttgagttataatatggttttgtgacttatgagctgtgactcaactgcttcattaaacattctgcattgggtataatctaagaattgtttacaaaaagattattttgtatttacccttcattcctttttttgatccttgtaagtttagtataaatatatctagacattcagactgtgtctagcagttacgtcctgcttaaagggactagaagtcaaagttccttgtctcactatttgatctgctttgcagggaaataacttgttttttctcatgtttcatcttctttttatgtaaatttgtaatactttcctatattgccctttgaaatttttggataaaagatga

SEQ ID NO: 503 - DNA, 256 bp, Homo sapiens
  misc_feature 224: n = A,T,C or G
accagcagtgtgtcaggtgctgcagagcgttcttggagaaggcccactgaggcaggttcgtgccctgctgcggccagcctgactagaccccaccctgaggtcctgcatttctcagtcggtgtgtaatcacgttccagggcccaaagcccagctctttgttcagttgacttactgtttcttaccttaaaaagtaattgtagatggaaatcagttgtgtttggcangagaatcaataaaaatctttgattcagacagc

SEQ ID NO: 504 - DNA, 255 bp, Homo sapiens
  misc_feature 166: n = A,T,C or G
actgttaatgatgttaatgatttttttttaaactcatatattgggattttcaccaaaataatgcttttgaaaaaaagaaaaaaaaacggatatattgagaatcaaagtagaagttttaggaatgcaaaataagtcatcttgcatacagggagtggttaagtaaggnttcatcacccatttagcactgcttttctgaagacttcagttttgytaaggagatttaggttktactgctttgactggtgggcctctasa

SEQ ID NO: 505 - DNA, 485 bp, Homo sapiens
  misc_feature 70, 180: n = A,T,C or G
agcttggtccgagctckgatcccctagwaacgccgccagtgtgctggagaattcccccttagcgtggtcnttgcccgaggtacagaaaacccaaaggcaaccacatagcatatgtaaaatgtgcaaatcactttaaaatgcaagttattctatagcatttgcaagatagaatttcactgnaattagggaatctagttcatcctaacttaatagtcttttgcatgtatagacaatgcaattctacaaggcacaactcagcgttgatgctaaagtatgaaacacatcctcagattatttatttgaaaatattaaaatagcatcgtttattattttttaatgagtcatgagctcatttctaaagcttcataaagcattacactgataacatatgtgtggtcaggacaaactgttccctgaacttaagaggtgaaggacaagaccccatattattatcctgtattaaaaaaggaaatatacatatatgt

SEQ ID NO: 506 - DNA, 230 bp, Homo sapiens
acaactccaaaaggagacattggagaagaaccaagctgggtctataaggaattgcacatgagatggcacacatatttatgctgtctgaaggtcacgatcatgttaccatatcaagctgaaaatgtcaccactatctggagatttcgacgtgttttcctctctgaatctgttatgaacacgttggttggctggattcagtaataaatatgtaaggcctttctttttaaaaa

SEQ ID NO: 507 - DNA, 179 bp, Homo sapiens
acctacttctccacaccgctgttgcttgggaaaaagggcatcgagaagaacctgggcatcggcaaactctcctcttttgaggagaagatgatctcggatgccatccccgagctgaaggcctccatcaagaagggggamtatccsgtgaacaccctgaaaagakccgctgtgacgggtgg

SEQ ID NO: 508 - DNA, 321 bp, Homo sapiens
acagagttttatataaatttaaaccaatttttaaaacaaaactgcggacaccaccataaaaatggaatcaaaagaaagttaatttatgaaattaagaggtcagcagaatatactcagtgatggaagacacttgggaaagtctttttaatagaacaagaacgatcttaatttaagaatattatcctggtttaacaacagtgccctgtttacaacagattgtgccctatctcatctgcagccgaggaataaaggattctgattagaaagagggttgcctacagattagtaagcaattccttggatcttatgcacagaacttgt

SEQ ID NO: 509 - DNA, 176 bp, Homo sapiens
acgtgggatacgggtcatgggcagagctcctggcctcagtgatgcctcctgatctatccataggcctggaagatcagcactgggatgacgatgagcagaatggtcatgaggatgcccasaatcagggcccacatgttcaggcacttggccggtggatgcatargcctgggcccctg

SEQ ID NO: 510 - DNA, 298 bp, Homo sapiens
  misc_feature 246: n = A,T,C or G
accaactttatatcatatgtttatacaatttaatttaaaaattcattttaaggaagacagataatttgaaagacttttgtttttcttgacttaattcatgaagtatcattttttgactgagtctccatttacttcattcttaatgattattgtcatccctttaaatctgtgcctttttcttcttgagcgaagctgtttgagtaaacctgttgaagagtgtttgtgtcttttgtgcttttttgttgntattaaaacaccaactaaaccttatagtcaagacaaggctctatgtttctgt

SEQ ID NO: 511 - DNA, 345 bp, Homo sapiens
acagatttttgtatagctgataagattctctgtagagaaaatacttttaaaaaatgcaggttgtagctttttgatgggctactcatacagttagattttacagcttctgatgttgaatgttcctaaatatttaatggtttttttaatttcttgtgtatggtagcacagcaaacttgtaggaattagtatcaatagtaaattttgggttttttaggatgttgcatttcgtttttttaaaaaaaattttgtaataaaattatgtatattatttctattgtctttgtcttaatatgctaagttaattttcactttaaaaaagccatttgaagacctaaaaaaaaaaaa

SEQ ID NO: 512 - DNA, 459 bp, Homo sapiens
acttatttcaacaattcttagagatgctagctagtgttgaagctaaaaatagctttatttatgctgaattgtgatttttttatgccaaaatttttttagttctaatcattgatgatagcttggaaataaataattatgccatggcatttgacagttcattattcctataagaattaaattgagtttagagagaatggtggtgttgagctgattattaacagttactgaaatcaaatatttatttgttacattattccatttgtattttaggtttccttttacattctttttatatgcattctgacattacatattttttaagactatggaaataatttaaagatttaagctctggtggatgattatctgctaagtaagtctgaaaatgtaatattttgataatactgtaatatacctgtcacacaaatgcttttctaatgttttaaccttgagtattgc

SEQ ID NO: 513 - DNA, 422 bp, Homo sapiens
gccccgtagtgatgagcactgactggttcactggccacattttagttcttcataataataggccacaaaagggctctgtggtttgcctccatgtgcactggcccctccccacccctagggggcactcagtagctgctgagaaggcctgtccacgaggctgttggaacccctccaataaatacttagaggtagtgtatctgatgcttgttttcgtggagaaaattgtattggagaacttaaaacatcacgaatatttttaataggatccgcagacacccaaaggagaagcttggtcttttccaggtatttccaacttgagttcagcccaaagcctttgaaaggaatgcattaccacatgaccacatgctgagaccccatggggtctaacacgggacctaagaaagtctctgcagccagatagt

SEQ ID NO: 514 - DNA, 326 bp, Homo sapiens
accagtatagtaatatctgtatactaactagggctttgtattgtcaataattttttaataattttttaatgaggtatttaccactgaagaaatatgataatataaaaccatcaaattttataattgagatgatactctggaaaaacatgtcatttcattttcagaaaactcttaagctctcttcagtctctgtaatgtttctgattgcatgtttcttcatgaaaagtatgttgttgttttgatagtaataataataaatgtaggctcagttctttcccaggattttcatcaaaaagctttaagtgcctaaccctgcttgtctctgt

SEQ ID NO: 515 - DNA, 323 bp, Homo sapiens
accagatgtagctaggaaaacccaaacgttccttggatcctgagacagctggtaagcacccaggccggctagactgccaaagagcagccctgcagccagggacggcacgctgcctgcttttacatagccaatgatcccaccagaagcaaccagtgctgcgtagccaaagccaaaccaatgcaagggcactactgagccagtgtcctgcatttttctcttctctgtccagacaggagactaccccaggcctgcaccggtctcacgaaggccccggctgtctacaagggcgcgcaagccgcaggaatgactgcgaggtgtcgccg

SEQ ID NO: 516 - DNA, 403 bp, Homo sapiens
accccgttggggttcatttcctgcccaagaagctggatgaggcagtggctgaagcccacctgggcaagctgaatgtgaagttgaccaagctaactgagaagcaagcccagtacttctaaatactgagtgaatacatcacagattgcataaagtgcatgattgcaagttgttgtcatccattcagctttctctgtctgttgttctggcaatttcatattgtcaaagattctgaaaacaattctaaataaatcctgccaccagtgtttctcataagtgtggccatatgttttcattatttcaaacattactgttaaacccctggttcttacatctaatttgcatctattgatgatacaggataactcaaagagaattgggaaccatcctctcacccacaccctgt

SEQ ID NO: 517 - DNA, 360 bp, Homo sapiens
  misc_feature 335: n = A,T,C or G
acctgaacgaagtcgcgggcaagcatggcgtgggccgtattgacatcgtggagaaccgcttcattggaatgaagtcccgaggtatctacgagaccccagcaggcaccatcctttaccatgctcatttagacatcgaggccttcaccatggaccgggaagtgcacaaaatcmaacaaggcctgggcttgaaatttgctgagctggtgtataccggcttctggcacagccctgagtgtgaatttgtccgccactacatcgccaagtcccaggagcgagtggaagggaaagtgcatgtgtccgtcctcaggggccaggtgtacctgmccgggcggccnctaacggcgaattmtgcagatatcc

SEQ ID NO: 518 - DNA, 255 bp, Homo sapiens
cataaatattatactagcatttaccatctcacttctaggaatactagtatatcgctcacacctcatatcctccctactatgcctagaaggaataatactatcgctgttcattatagctactctcataaccctcaacacccactccctcttagccaatattgtgcctattgccatactagtctttgccgcctgcgaagcagcggtgggcctagccctactagtctcaatctccaacacatatggcctagactacgt

SEQ ID NO: 519 - DNA, 449 bp, Homo sapiens
accttcctctcaattttgctgtgaacctgaaatggctttaaattaatactcttattttttatttaatttaattacataaattaaaccttaccatgaccaaattgtgttaggacggcctgctatctacagcacagtgtgtcatttgcagatttgtggttacctataccacgctaggtgttttgacatgtttagtatttctgctttacagtgctgaattccatattttagaagctatgaaagtccttttatgaaaaagttactgattgcttctcagttattaggaaaacagttgtttcacaattattatgtagatatgatgcccaaatatcatttttagtatatcttgtcgatctttaagttgttactattgtgttattcatgtctttaaatcagataccaaatattttttaggaaagaaaaatgttattactgtcattaggttggctttt

SEQ ID NO: 520 - DNA, 92 bp, Homo sapiens
acccccatcacagcagtcaaacagcctgagaaagtggcagctaccaggcaggagatcttccaggagcagtyggcaryagggccagagatccg

SEQ ID NO: 521 - DNA, 123 bp, Homo sapiens
acagaggggacaacaatgaatcagaacagatgctgagccataggtctaaataggatcctggaggctgcctgctgtgctgggaggtataggggtcctgggggcaggccagggcagttgacaggt

SEQ ID NO: 522 - DNA, 303 bp, Homo sapiens
  misc_feature 277, 284: n = A,T,C or G
acaaaaaaatgaatgttacaaaaatcacgtaaaaaaaactaggctcaaggaagcagccgcccttgcaagagggctcaaggcacctgagaggctgagaagaggccaacctggccatgggcgtggctgcatggacagctcttccctcctgcccttccccagatgcccttccctcctgccccgaggggcacactccctctccccaattacaggtgctacaaaactgccttgaataccaccgccaaggcactgccagagatgaaatgggccctgagcagangcctcangctctccctcccccgtagc

SEQ ID NO: 523 - DNA, 424 bp, Homo sapiens
acagtgcatggtgctgtcacttggaaagcctttcaatgttgtcttcagattgttgtgatgaatatgaaacatgcagaccctcctttataaagaaaaagaccttaaaacttgaatatgagataattttacattttaaaagtttatttgattttcatattattcactttcaaagccctttcaaatagaaaaggtatgaacttttggggggataatttatgtatcgtaaacttattagaacaaaatattcctgatgtataatgagttgttttatttatacaactttttcaatggtagtttgcactattctttattatgctacaggtttatttattatgaaacaaaggaatatgtattttatgtattttaccatgcataggttaactctttgccacagatttattggtcttgatacacctaaaataaa

SEQ ID NO: 524 - DNA, 172 bp, Homo sapiens
acaatttcattgcagacacaaagacttaagagtttcaaagaattttttaaaataaaaaaaaaatttgcacttattcctcacaaaatcttcacttttggaactatcccaattgaagctacacactgaatttattaatacagcattaagtttctttgtgtaaaaaaatctttgt

SEQ ID NO: 525 - DNA, 256 bp, Homo sapiens
actccttcccagttttttctttatactgagccttcagggacagtaagcattctacagcttcatttattttagccttaggggatttttcagcttttagcttacgaaccacctccccttgtgcagcaacttcatcatacagagatttactttccagaatacttgctgaggaattagaagaaatattctgtcctatttcagcaggagggtttccaggtttatattcctggccagttttctccttatattcaagctttca

SEQ ID NO: 526 - DNA, 479 bp, Homo sapiens
actggagatgtatttgataaccaaggttttaggtaaattttcaccagtattagttctatttgcaaactgaaaaatgttgtaggcttaatataaaataaccacattagtgaacattatatctcttagaagaaaggccatattttgctcctgcttctgtaaaaatattatttgtttgaaggggaaataatggtagtgtgacctttcacttaattcctactcccttaatgtgagagagacaaaatgagctgaagaaggaaaattctggagttacactccacaaccttgaacatactgacggacatctctgttttgacaacgatttctccatgccacccatgctctaatgccttgtggatcacggacaaccctctttgcacaagctacagcatcagcgatgttatcttgcagcaaagcactgcaggataaatgacaggcattaactgctcctggggttttgccatcattacaccagtagcggc

SEQ ID NO: 527 - DNA, 220 bp, Homo sapiens
accaaattgaagggtttagaggccctcaaatgggcatcactcataaaggcaattttcatggtttaatatagaaattactctaatgtgagaacacaacatgggaactattcaaaatacacctttctatgcaaaattgagtttgyatctattttagcattttaaatgagcactctgcaactgagaccaaatatcaatcatctcttgaggttttctactatgt

SEQ ID NO: 528 - DNA, 373 bp, Homo sapiens
acamcatcgatgaaattcagacatacaatgtaaagttgaaataatcccaaattattttacattatttatgtatactttacaaataacacaaatatggaaatgttttcttggaaagctgttggaactgtaagcactgcaacgtatgaaagaaacatatttagcaataaaaaatttaataatatcctacaactgaattagttgcatatttataccattcaaaatcttgattttaacctcattcactcctttgaaaaatacattcctcttttgttcttttaaatgcaaaattagtggcagttgcagcaaaaacgccgaaattctataagaaaaaaactgatttaccccaaacatatcattcagcacaaactgcggt

SEQ ID NO: 529 - DNA, 344 bp, Homo sapiens
acatttctaagtcaaacacttgtgacttttgctttaattccatgaatgttcctgcctccttgatatttgtatttattctttttttctctagagtagaggtataattgtgtgatatttcagaaatacagataaatgattcaaaaagtcacagttaaggagaatcatgtttctttgatcatgaataactgattagtaagtcttgcctatattttcctgatagcatatgacaaatgtttctaaggtaacaagatgagaacagataaagattgtgtggtgttttggatttggagagaaatattttaatttttaaatgcagttacaaattataatgtattcatatttgt

SEQ ID NO: 530 - DNA, 354 bp, Homo sapiens
accattgctctttcctagctaaccctagatatggcagctctttaatgtacctgagatcctggtgcacaacatagtgatcttcatgcgaacttcagtgaagatttcatacattggcctcatgacccagagctccttggagacacatcactatgtggattgtggaggaaattccacagctatttaacaactgctattggttcttccacacagcgcctgtagaagagagcacagcatatgttcccaaggcctgagttctggacctacccccacgtggtgtaagcagaggaggaattggttcacttaactcccagcaaacatcctcctgccacttaggaggaaacacctccctatggt

SEQ ID NO: 531 - DNA, 418 bp, Homo sapiens
acacatcccatcttcaaatttaaaatcatattgtcagttgtccaaagcagcttgaatttaaagtttgtgctataaaattgtgcaaatatgttaaggattgagacccaccaatgcactactgtaatatttcgcttcctaaatttcttccacctacagataatagacaacaagtctgagaaactaaggctaaccaaacttagatataaatcctaccaataaaatttttcagttttaagttttacagtttgatttaaaaacaaaacagaaacaaatttcaaaataaatcacatcttctcttaaaacttggcaaacccttccctaactgtccaagtatgagcatacactgccactggctttagatactccaattaaatgcactactctttcactggtctgaatgaagtatggtgaaacaagt

SEQ ID NO: 532 - DNA, 583 bp, Homo sapiens
  misc_feature 497, 498: n = A,T,C or G
cgtcccaacaattatattactaccactgacatgaccttccaaaaaacacataatttgaatcaacacaaccacccacagcctaattattagcatcatccctctactattttttaaccaaatcaacaacaacctatttagctgttccccaaccttttcctccgaccccctaacaacccccctcctaatactaactacctgactcctacccctcacaatcatggcaagccaacgccacttatccagtgaaccactatcacgaaaaaaactctacctctctatactaatctccctacaaatctccttaattataacattcacagccacagaactaatcatattttatatcttcttcgaaaccacacttatccccaccttggctatcatcacccgatgaggcaaccagccagaacgcctgaacgcaggcacatacttcctattctacaccctagtaggctcccttcccctacccatcgcgactgatttcactcacaacaccnntaggctcactaaacattctactactcactctcactgcccaagaactatcaaacttcctggccaacaacttatatgactagcttac

SEQ ID NO: 533 - DNA, 529 bp, Homo sapiens
gaggtacttaataaccaagtctcggaacactgagccatcacctgcaatgtttcctagagcccagacagcttgttcactgatgtgagcatggggagatgccaacagagaaatgaatgctgggatggcacctccatctaccacagccttggtttgttctgatgtcccagaagcaatgttagtgagtgcccaagcagattcaaactgaatgggactacaatcagttctgcccaagaaggacacaaatttcggaatcaaaccagcccggattatgttgtctatggggggctgtttttctctggaaagtagtttcctggcagcttgagtagcttggagctgattttccacattgctgctatttatgcctttgacaatgtcatcaacagaccaatttacagtgccctggttgttgcggttttcctgcagcggagaagtagcatcatcaggaaatgagcttacatttctcctcttcagcatctggtcatccttcttagctttcctcagctccacattgacctctattctgcgacgc

SEQ ID NO: 534 - DNA, 297 bp, Homo sapiens
actcattaatattattttgttttgagaaagccagaaatgattctaagaaataaacaataataataaaagatgtaattaatatactgtatcccttttaagccaaagcacactttttacctcaagactgttctgacttttacattcttaatttcctttgtccaaaataggaccccattttaaatagagttcatttgaattgagttcataatctaaagtcacttttccccacaagatgttttcatttcagtatataaactgctaagcggcaaatgactaagtcagttataaagaatttgt

SEQ ID NO: 535 - DNA, 373 bp, Homo sapiens
actttccagggcacagcctggacgaatgatgccaaactttccgggcacagacaaatcaaccacagttgagccaaggcgacactcggggctctggccatccccaatttgtcccccatcaataaccaaggacaactgaggccagagatcctggaactcctcgacattcagagaactggcctgggagctgaggttggcactagtgagagcaagcggaccctcaaacatctgagccaagtcttgcataaaagcatgatcaggaatccgaatgcctacaagaggcgtaaaagggtttaggtccttgttgagctcctccgagcgttccatcaccagggtcactggtcctggcagtaggtctttcaggagcccctcaggt

SEQ ID NO: 536 - DNA, 254 bp, Homo sapiens
acatgctccattaaattaaatgtcatccaacatttatcaaatattgtcttagttacagcttgatacctatctaaattcatattcgagcaaaactaggccccgaaagtgcgtttgtggctctgcacctccagaagtgagttcaaaaaacctgcagctcatcagaactgcaacaataactcttaatattttcttgtgacaaaaaaaaaaatcaagtttacttcaatatattttcaaatatttactggaagtaatgt

SEQ ID NO: 537 - DNA, 449 bp, Homo sapiens
acagacttgtttttgagtgttgagtagcagggacaaaataagggaatgttattttttaagaaaattcattttcattgttgtctccttccttttctgtgaaagtcctcatactgagaaatttgtatattttatattaaatcacttactattgatttttgttgtgattttcaaaggtggattcccacagataaaatcttggctattgcccaaaacatagtaaagggtcacgtgtgactttttataataggaagaaaattctgcctttgtgagtgcacatgtccacatttcatccctccttccctcaaaaccctagagaggggcattaaagaattgttgatgtatatgcaatgtctgttaagcatgcactatgtatttcatcctcatttattgggtctgggactgaagtttttagccagcatggacctaacctactttttgggataaaattc

SEQ ID NO: 538 - DNA, 328 bp, Homo sapiens
actcagcgccagcatcgccccacttgattttggagggatctcgctcctggaagatggtgatgggatttccattgatgacaagcttcccgttctcagccttgacggtgccatggaatttgccatgggtggaatcatattggaacatgtaaaccatgtagttgaggtcaatgaaggggtcattgatggcaacaatatccactttaccagagttaaaagcagccctggtgaccaggcgcccaatacgaccaaatccgttgactccgaccttcaccttccccatggtgtctgagcgatgtggctcggctggcgacgcaaaagaagatgcggc

SEQ ID NO: 539 - DNA, 506 bp, Homo sapiens
tcgaggtactttggcctctctgggatagaagttattcagcaggcacacaacagaggcagttccagatttcaactgctcatcagatggcgggaagatgaagacagatggtgcagccacagttcttttgatgtccaccttggtcccctggccgaacgtccagcggagagactgttggcagtaataaatggcaaaatcatcaggctgcaggctgctgatggtgagagtgaattctgtcccagatccactgccgctgaaccttgatgggaccccactatgtaaagtagacgccttatagatcaggagattaggggctttccctggcttctgctgataccaggccaaccaattattaatattctgactggcccggcaagtgatggtgactctgtctcctacagatgcagacagggtggaaggagattgggtcatctggatgtcacatttggcacctgggagccagagcaagcaggagccccaggagctgagcggggaccctcatgtccatg

SEQ ID NO: 540 - DNA, 519 bp, Homo sapiens
tcgaggtacctttccttgtttcctagaattcctaaggaggaacaacaacaaaatcggggtttgttcagcaattgcaccacatctctaaaaattaaaacattattcagtaagtgaaggtttctgataaacaagtggatcaaactgaatatttccaattaagaaagttcacaataatacagtagtgtattattaccaataggaaggcctaatagtcgactattattttttaaggcaagaaaaaagaaaacaagtgcaagctatgccaagctttggtgaatgctgtccttggcattgcaagtataaagtttgtttaaaaagaaaagggaaaaattaaactaatgcttcaacaaccacagaataaggtttaggactgcaaagaaagaggaaaaaaagaaacattattcctctccaattatactgccaagcattcacaagtgagctagggatcataaggttaattatacatttaataaggtgtcagggagataactgctcatttctttataaaaattaaaatgt

SEQ ID NO: 541 - DNA, 431 bp, Homo sapiens
acttgaggcttttttgttttaattgagaaaagactttgcaatttttttttaggatgagcctctcctagacttgacctagaatattacatattcctccagtaagtaatactgaagagcaaaagagaggcaggattggggtcacagccgcttcttcagcatggaccaagtgggccttggggattgcagcgttctcgaagtggctgtaggactcgaatttacagaaagccacagaggtgcaacttgaggctctgctagcaagccaccagtgaggctattgggtaaccacctttctatacaggagattggaatctactttgtcatttatccaccacagtgacaaaggaaaagtggtgccgttatgcaatccatttaactcataaacatattactctgagtaactggccagccattcatcggatccttcattgggt

SEQ ID NO: 542 - DNA, 502 bp, Homo sapiens
acaaaaaaggaaataagaaagtagtgacagcctatccatacaaaaatcaaaaagacacaaaggaagatagaatgagaaacagacctacaagaatcattaaacaataaaataacagtaatctttgtcttcagaaaataaatattttaaaaatagacttgccaatcaatacacatacattgaatagagggattatataaaattttatataccaagatccaacttgcctctcttcaagagtcacttgagatctagtagtgaaatcagcctgaaagtggcaagtggaagaagacattttaggcaaacatcaaccaaacgagagcagaagagatcaaaattgtattatacaaaatacatcgtaagtcaacaactctcttattttataaaatatactttatgtcaaaattcacaagagaaaaaaggtcattaaacaataataaagatatcatttattgaaaatgtatgacaaatatgtgcatacatatatttatatgtttgtgtctgt

SEQ ID NO: 543 - DNA, 452 bp, Homo sapiens
  misc_feature 403: n = A,T,C or G
actacaagggcagtaaaacaatgatacactggaaaaaaaaaaatgcagcaataaacatttgttaaaaagactgatagaataaataaaactacaaaaaaaaaaaaatcatacaaacccattctgaaaccccaagaagtcctggaatacagaaatgccctcctccttcactatttcacaggaagcactgcaggctatttgcttaatattgtcctgggattacattctaaaattagtaactggttacagctcggttgtagtgcacaattaaaatcacactaacttcatctgaagtgtcattctacagttttatttacacaaccagtgaagggcatgttctagaataccagctttaatccttttcaaacattaatataagaagccaaattgtaatgatacagcaaantgaggccactggtattaatacaggtagcaaaggtccacatccaggtggt

SEQ ID NO: 544 - DNA, 472 bp, Homo sapiens
caatcatttataatagaaacaccttgaccacaagcccttgattgaacattttataatatttcatctacttattaaaacaaataatttcccttgggttggaggggaggtgatttcataaattaattagaaagccatctttagcatattgcttatgtctggatccatgtttctgaggaaaaagacattctcaggtgatgtatttttttcatgcattagtatgcatttttaaaaaataatgcatgtttctttaataattaattttcatcttctataagatgccatgtgaagaagttgtggaaatgtagaataaaaagctaaagctgccaaatttctgttgaactcttaaaaacagctcatgtttgtttgtcctctcgggttgtggcctagcctatttgcaatgtaatgaagctgcagggttcttgtatagctaaagcgttcaatgcatttcacgtgctgtggtggatgtgggtgc

SEQ ID NO: 545 - DNA, 281 bp, Homo sapiens
  misc_feature 180: n = A,T,C or G
acttaagcatttccacttttggaagaaaagtgtattagtattttatattgcatttcatttaaaaggacagttttttttttttttgtaaatccattcattgaaatggtttctaaactgtataatgtaatttggagcctatttagtaatatgaattaaatgtcctatgtagtgctacaattntygaattagaaagtgatcaaatgtmasaaaaaaattyaaaaattcagcccagaaaacaaaatagggtattaaattagtttaatgtaaaaggaattwataag

SEQ ID NO: 546 - DNA, 423 bp, Homo sapiens
tcgaggtactgagacagaagattgtgtctacataagcacaagttgtaacatttcacaacttctaaaaggaatgtcaacaattacaacgatcatgcataccatggtcgataatcacattttagaagcattttcaaccatttctaaagaaatgcttataacattgttatatatagaactactttcaataaactgcaaaacattgatcgacttttccagtatgagctacagtgtcaacacaaaagggaggcataaatgtttaatttatgaaatcagaatggaatatttactgtaaagaaaaattaaaaagctttcaaataaaggccattatcgaaccaacgtgaagagcacaactcgaacttttgagttcattcatcttttaaagctgtcctctcaataacttcagttctaagcactgaattcagt

SEQ ID NO: 547 - DNA, 399 bp, Homo sapiens
gaggtcttttagcaggtctcaaaagttttcttctaataraywtcttggtgttctatcattcgtaggtgttgaatttaccaaactttttctatttcaattattacatttttactttgttcaagtaatattgtatcatattaaatgaacattgcattgtgaaaataccctgcttagtcatggtatgtaatcatccttatacctttttgtattctttttttaaatatttctgagaatttctgtgtctaaatttaaataggatgttgttttgtaatcatcttgtgattcttttgtctcctttgggtattattggccaatagatgaattaagaaatgttacctcttctactgcttgaagtttttgtgagaaattgatgtttttcattaagtgttgatgaaatgt

SEQ ID NO: 548 - DNA, 246 bp, Homo sapiens
aaatgcattataaatgtttttaattgtgttctgttttttgcagtctttaagtgccatgccaattgttcttatattctatagaagttcgctcaaaatactcaacaggggaataggcagcggacagtcagaatggttggaattttggctttctaagaaaaactttattttgcataagcatgtggtcagatcattttgtgcatatgcagcctggattggatgttaagtaaatgcttgttcagtgccggt

SEQ ID NO: 549 - DNA, 413 bp, Homo sapiens
acaaactggtattttatactgttccaatgccagtaatcaatttattttcttcattaaaataatatacacagaatgtattgttagttcgattccttcaaattttatacatatttactttctgttaaagagaaaaggataaaatggtataaaaaaagataaagctattaattaagcacgagagagaagataaatggatattttccctgtgtgaggctaagacagaagcaaatctcgttaagaaaaatgccacccacacaacaggaaatttatccaaaacaaaacaaaagcagttatagaaccccttctctaccatcagaagtaatttcacagcaataaacttattggttacaacagacatacttgaacagttaaggatgggaagaaaggcttaagatatcaccaaattaaaccgt

SEQ ID NO: 550 - DNA, 215 bp, Homo sapiens
acataaggttcaaagtttcctttcctttttttatttattttatattttgcaatgttttttttccataatatttaagtttttcgatgtttagatatttttcttcggtgaagcacaagtwtcttttcatggyccctgakcaattttaaacagttggaacaccggtggcactgataactgctytctgggcagcctctttagcttggggggctbgtagg

SEQ ID NO: 551 - DNA, 175 bp, Homo sapiens
  misc_feature 154: n = A,T,C or G
ggcggaggagcggtaactaccccggctgcgcacagctcggcgctccttcccgctccctcacacaccggcctcagcccgcaccggcagtasaagatggtgaaagaaacaacttactacgatgttttgggggtyaaacccaatgctactcatgaanaattgaaaaaygcttatmmga

SEQ ID NO: 552 - DNA, 298 bp, Homo sapiens
acagtgtatactatccccaccaaaggaaaaaaacattaagagcaaaacaaggggtggggggtgggaatattgctaaagaaaattctaataagagttatctataattatagcttttatttattatatcttcattcaatcatttattcacaattagtctaattgcattcttgatgaataactgacttcagcaaaggagtcaatccactaagcaaagttcatttatttttcatgatgttcttctttcgatcttgagtctttactctcctggattcccaagagaactgcattagcctctagt

SEQ ID NO: 553 - DNA, 437 bp, Homo sapiens
yacaatggcttaagcaaatcgctttagttttttttctatttaagatttaggacagactactcgtctaaaattcactatttacagagaaggtcctagggaacaggataacttatttaggtttagctctcataatacaatatccataatggctttagaagaatgtaaataaataacattggtaaacagcgtatactgatattttctgacaaactcatttatctaacatcatgctgagcaatcaagaggattcctctatatattttaaattttaatttattctatttcctgattcacaaactcttgctccatgttaaagcagttatcaccaatagaacctatgagaaccagtgcccatggaaacctaacagcttgtttttttaatcccctattaaaactcggttgaacttgatatatgcatggttgaaatatgcgtgggt

SEQ ID NO: 554 - DNA, 575 bp, Homo sapiens
ycgaggtacttttgacaacatttatctgcatgtccagatcagcaatgagtcggcaattgacttctacaggaagtttggctttgagattattgagacaaagaagaactactataagaggatagagcccgcagatgctcatgtgctgcagaaaaacctcaaagttccttctggtcagaatgcagatgtgcaaaagacagacaactgaacaaattacaaatgaactttcttgcacttgcttgtcgccaaataaaagagaggcccattgattcctcccccaccccaacacttttcttttaaagcttttctccctccttgttcttgtttttctttcttcctttccttttctctgagagttttaatactttcaaggactttaaaaaaataatcatgtttgaattgttttctcttatttttgtgaggtggtttgaaggaaggacaaggtagatctgtttagttttgcagttgaagttagatggtcctaaacatttaattgtcaaataatttcaaatttaatgtcctgctttcacattgaagggcagagcctacaaaacattgtatatttcaaaagacaaaaa

SEQ ID NO: 555 - DNA, 226 bp, Homo sapiens
accgaaccatgaccacccctggcaagagccttcatgcacctagcaagtagtcacagcatgcatgtgcctagaattgttacgtggtcaaattatattattgtgtattcccaccaacagtatgagaaggtccacttctccatacctccacaactctgggcatctaaaacttttaaaatcctggaatcataggcaaaaaaaaaaaaattcacccatattttcctctagt

SEQ ID NO: 556 - DNA, 298 bp, Homo sapiens
acttcatataagtggaatcatatagtatttgtccttttctgtctggcttatttcacatataatgtcttccaggttcatcatattgtagcacatgtcagaatttcattcctttttaaggctgaataatattccattatgtgtataccacattttgtttatccattcatccatcaatagacatttgggtatttccaggacaatatattcttaatttaatcccacattttaagacttacaggtaatttaaattcaattcaacttactgagtatttactaagggtaactcactatgggaagt

SEQ ID NO: 557 - DNA, 166 bp, Homo sapiens
actaatggtctacatccgattcaaaaccacatagttcattgatcacagatgcatggtattagtcacgaaagtttcagaacacattgtgttgattttgaaaggtcatttgcatcttctatgatttcaactttatctccatttaacttgcttgtaaagtatgtatgat

SEQ ID NO: 558 - DNA, 461 bp, Homo sapiens
  misc_feature 448: n = A,T,C or G
actccctgttttgagaaactttcttgaagaacaccatagcatgctggttgtagttggtgctcaccactcggacgaggtaactcgttaatccagggtaactcttaatgttacccagcgtgaactcgccgggctggcaacctggaacaaaagtcctgatccagtagtcacacttctttttcctaaacaggacggaggtgacattgtagctcttgtcttctttcagctcatagatggtggcatacatcttttgcgggtctttgtcttctctgagaattgcattccctgccaggcctaccacataccacttcccctggaattggttgtcctggaagttctgctgcagagggaccttgctcagaggtggggctgggatcaggtctgaggtggagtcctgggcctgggcatgcagagcccccaacagggctaggcccagccacaggagacctangggcatgatttca

SEQ ID NO: 559 - DNA, 193 bp, Homo sapiens
accagacagaatcaggaaaaaaaaattgaaaataagcataacactataaagaaaacttggaaaagtgaaacacttctaaataaaaaatatacacctggcctggcacccattacatatatacataatacatgttataaacatatatacagtaaatgttttggtagcaatacagaccatgcattggtctttgtgt

SEQ ID NO: 560 - DNA, 125 bp, Homo sapiens
acacaattattctcactctccacagaaaggctgcttaacttctcatctggwggwggsaagcactaaaatcctgattttaacagaatagtagkaaaaatgcctcagtgatttaagttgaaagcagt

SEQ ID NO: 561 - DNA, 325 bp, Homo sapiens
ccgaggtaccacggcctcagagtcacagctttgtgacattagggggcaatctccagctttacgttttagaagacagtttgttttttgatgtatatttttaatatccccagattaaagaaaactcagggcaagtaacacactaaaagggcctttacaatttttttcttgctgttattttgagatgcatctgttgcaaaatatgtcaatgttagaaatcaagctccttcatatagggatagatcatttgaaatagatttctctcaagaataatccaattattactttttagtgtttgcataaattcactccagaagtcatccacagt

SEQ ID NO: 562 - DNA, 303 bp, Homo sapiens
accagatggaaatgatatttgcttcactccattttgaatttctgcctgaattagctcttgtttcagttcttcaatttctttcttcagtttagcattttcaactcgaagtttcttctcttccctcaaagttgcctgcaaaattgctttctccttaagtagagaaacttgctgcttaagatattcaatgatttgatctgcctctgcacccttctgctccagtctcttcagaacagcatcattatttgccatttttgccaagagacggcagaaaatcatgaagcggaggaccacgggttccgagac

SEQ ID NO: 563 - DNA, 279 bp, Homo sapiens
tcgaggtacacagtcattgaagactctccggaattcagatttgaaaccatatattatcttcattgcacccccttcacaagaaagacttcgggcattattggccaaagaaggcaagaatccaaagcctgaagagttgagagaaatcattgagaagacaagagagatggagcagaacaatggccactactttgatacggcaattgtgaattccgatcttgataaagcctatcaggaattgcttaggttaattaacaaacttgatactgaacctcagtgggt

SEQ ID NO: 564 - DNA, 427 bp, Homo sapiens
ccgaggtactgtgtagtggtatcagtgttaaaaatggaagatcattatgaagaaacaatttgtcatttgggtatatctgtttctataggacaaggatttgtgtctaaatattccttacttgtatctcagaggactatctgttaaataattgatcttaatgccagcataagaaatcaagggaactatttctcagacatttctttctctaaattaagtagggtttcaggttccaagtttacattgagagaactatgttacctgggagagaatgtaaatttttctaattcccaaacaaaaccactaatttctaggaaacatttattgtttatatgcagatcctagagacttctatttcagtgcggatcaacaacttcaaaaatatacagcctcctatttatttacaataatatttacatacaaatgaagt

SEQ ID NO: 565 - DNA, 214 bp, Homo sapiens
tcgaggtactgggtcttttccagccaggcctgcaacggtgaccttaatcccagctcgcctcatgacatctacagggatgaccgtctccatttcctctgctcctttagccaggatgaccagagctcttttggaagccatttttatgttatatgtttacaagccccacaccaggctgaaaatgaacgcacgccagcacgcacgcgcgccgtccggc

SEQ ID NO: 566 - DNA, 382 bp, Homo sapiens
ccgaggtacttttagttttttcacataactctctaaaggccttttcaaaaagtctctttcactggcatcatctactagaacaatttcttctatcatgtgtcttggtgagcgattaatgacactatggacagttcgcagaagtgtgctccaagcctcattgtggaaaacaatcaccacacttgttgtaggaagattatctggatacacctttgttttacacccttctaacctaacatctggtaaagatctgttgagtgcaatcatctcacttgccattaaattgaactgattgattttaaacatctctttcatcttttcttgatcctctttaggaatgacgactggtttccccatttctccaggaccttcatgaggcttttgt

SEQ ID NO: 567 - DNA, 271 bp, Homo sapiens
  misc_feature 168: n = A,T,C or G
cgaggtacaattacccaccactggaggtgactcagagaggacccccagagggtgtctccatcttccctatttattttcagcccttgagggcttcattgtagatcaaagccaaggcccccaggaaggtgacatactcctggaagttcacctcctggtccttgttccggnccaagtcttccatcagccttgcaatttcagcatcctgcagcttcgagccaatggtgagctccttctggatcagctccttcagctccttcttgctcagggtgtg

SEQ ID NO: 568 - DNA, 340 bp, Homo sapiens
  misc_feature 326: n = A,T,C or G
cgaggtgcagtgtatattcctttgttgtgaatccaaatctttttcataggtaatgacagatgccttaatgtgaagcttatttataatagcaataaacctaactggatttggatgaagaagtcttaatactgacatactggatttttaatgcactggtttgttatttggtattctatctctttttccaggcctccaggttgcacatttatttattatgttcaatactttggttcttagttcttaaagaatcaagaagttgtgtaatcttttaaaaatattatcttgcagataaagaaaaaaattaagagtgtgtttacaactgtttnctcttttttacagt

SEQ ID NO: 569 - DNA, 156 bp, Homo sapiens
gccaggtaaaccaagacttggtctcagtgaagaaattccagaggtcaccggcaaagaagttcccttctcatcatcttcatctcagctattaaagatatatacagttgtacagtttgctctgatgttggcattttatgaagagacctttgcagatac

SEQ ID NO: 570 - DNA, 216 bp, Homo sapiens
  misc_feature 176: n = A,T,C or G
acagtactcagtatatctgagataaactctataatgttttggataaaaataacattccaatcactattgtatatatgtgcatgtattttttaaattaaagatgtctagttgctttttataagaccaagaaggagaaaatccgacaacctggaaagaattttggtttcactgcttgnatgatggttcccattcataccctataaatctctaacaaga

SEQ ID NO: 571 - DNA, 163 bp, Homo sapiens
tcgaggttttgtaatccaaggttctgactaaaagcaaaaatacacggcatagattgcaacagcaaagaagtgtccaattaaaactagagggttaggagacaatacagaaagcagcccaacaggacccgcaacacattcgccaccaagttttgaaataaagaaa

SEQ ID NO: 572 - DNA, 156 bp, Homo sapiens
gccaacgtgcagcggctgaaggagtaccgctccaaactcatcctcttccccaggaagccctcggcccccaagaagggagacagttctgctgaagaactgaaactggccacccagctgaccggaccggtcatgcccgtccggaacgtctattagaag

SEQ ID NO: 573 - DNA, 414 bp, Homo sapiens
ctggagccgctgtggttgctgtccgcggagtggaagcgcgtgcttttgtttgtgtccctggccatggcgctgcagctctcccgggagcagggaatcaccctgcgcgggagcgccgaaatcgtggccgagttcttctcattcggcatcaacagcattttatatcagcgtggcatatatccatctgaaacctttactcgagtgcagaaatacggactcaccttgcttgtaactactgatcttgagctcataaaatacctaaataatgtggtggaacaattgaaagattggttatacaagtgttcagttcagaaactggttgtagttatctcaaatattgaaagtggtgaggtcctggaaagatggcagtttgatattgagtgtgacaagactgcaaaagatgacagtgcacccaga

SEQ ID NO: 574 - DNA, 414 bp, Homo sapiens; identical to SEQ ID NO: 573

SEQ ID NO: 575 - DNA, 417 bp, Homo sapiens
  misc_feature 383: n = A,T,C or G
tggtatgggtcatataggttcggtacaacatgaagccatggtcctgggtatggaagaatgagtacttcagacaaacagaaataaaagaggacactgtgactatagccaaggaacttttgcgtatagctgttaagggaggttgtcatctccaccagatgtgggtttatgccttacctgcttgacagcctcaaaggtcattggcaagattgaatgaatgggcccacgggggcaaagcaagtctaggaaagccagtaaatgcccaacctattagaataagggagaagaattagaatatcagggaagtttctggatagaggacaagaaagaataggctatttagaaaaaaaaaggtgtggtcccattattttcaggcttcaccctanatgacacatgagcaaaagcccacttcgccatcat

SEQ ID NO: 576 - DNA, 245 bp, Homo sapiens
ggaaggggggaccctgccaaagatgaggctccagctgccctggggggagggtggtggccattactagagggggcctgggtcctctccccaggggctgccagcatccaggccaggaagcctggagccaagaaccttctggctctgagggagcaagagctggcaggcggcagggctggcacagacagacggaagcagaaaggacagtttggctgctgtgtctgctgcgcacgccccctccccggaca

SEQ ID NO: 577 - DNA, 418 bp, Homo sapiens
gaaaaccctttaatgttgggctttctttaaataaaacagaaaggttgcagctttcccatggtggctgtaaggcaagaacagcagtgagggcgggcgtgttctatcgggcagtgctgcagcccttgactctggctcaaggtgggcttcctggaggcagcggcaaggaggcagttctggatgtgcaggcacagatgtaggggaacaggcaagcgggcacagggccctgagctgacaagcagtgacccctgcacccagctagatggggcaccccctctctgggagctgagggcatcagctggagcctcaggctgggaccagccccaactttgccttggtgactctgggccattccaggcctcagtttccccactgtaaggtgaggcattaggcaggagggggtggccccagccagtgtcct

SEQ ID NO: 578 - DNA, 363 bp, Homo sapiens
  misc_feature 153: n = A,T,C or G
aaagcccagaaggcactttattggaggtctctgcctccattcacaggagaaaggagctgggagccccatcctagggtcccagcatcagcccactggagggcctggaacagtccagcactctgtgggagaggagtggggaggggaatgttttanaaaaaatagatctctatgtacatctgacatatttatatagcacataaattagggagtgctctgacccctgcccgtggagcccaagcactgagcagggaggtgaacgccagtccagaaagaaggtgctggagcccctgctctgttctctccatcacggggctcccctagggcctccccaggcctccttggctcagtccaggtttgtctgca

SEQ ID NO: 579 - DNA, 403 bp, Homo sapiens
ggaataatcagctcttctggcccacaagtaggaatgatcaatgagaacttaacttagtcctttatttggggattttttcatcaaacaaaaatttcttgaattggggagaccacttccctgtaactccagtattgccccctctcactttagcatatattaattagcaggttgggctagagaaatcagctgctatgcgggttgattattattattatttctaatccttttccttatttgccttctactccccttaatctaatctaaaagctctgttccatgcaactggagttccttatccctctcttccccttcccttatatattgaggctatggggtaggagaaaagtgcacaacccaccaccccctttactcgtgcattaaaatttcttatttacccttttcc

SEQ ID NO: 580 - DNA, 403 bp, Homo sapiens; identical to SEQ ID NO: 579

SEQ ID NO: 581 - DNA, 432 bp, Homo sapiens
acctgataaaagttaataatctcttgttaggaaagctgtccattaataaggccagtcttcagcaaaactaaaaccattttgttcgtttagctttcctagtctgacaacgcaatactgttgaaccacagtcaaatataatgacaacattggatggatagatcagtaccattggttacagctgttaaacaggttcgttcttggcgccacataaaaacaagccaataacatcgaataaatcatggctttttttttctttatcacaattcacttaagtgatgttaattatggtccttgtcaaacacgtttggtaaaggctatttacagtgtacatggctgagcatgcactatttatagttacaaagatacctgccagtttattacaatagaatacacagtgctgaaatggtgaactctcccatcttaatatatatt

SEQ ID NO: 582 - DNA, 215 bp, Homo sapiens
  misc_feature 121, 131, 142, 144, 147, 156, 160, 174, 178, 184, 194, 206: n = A,T,C or G
gtttatttcagctttacttaaaattttagtttcaaatgaaatgaaatgtgacactgaagcataagaacacaactgaagactgcaaacaacctaattcattttcccaggttgcttaagcctncaagcaccantcaaatatcgnantcnattaaaagnaggnctttcccatttgtngccngcttcngaatggaacntatttaaaaccntcaatttct

SEQ ID NO: 583 - DNA, 426 bp, Homo sapiens
  misc_feature 408: n = A,T,C or G
tgggcgcctgtgggactgggtgcctctggcgtgcagaagcttctctcttggtgtgcctagattgatcggtataaggctcactctcccgccccccaaagtggttgatcgttggaacgagaaaagggccatgttcggagtgtatgacaacatcgggatcctgggaaactttgaaaagcaccccaaagaactgatcagggggcccatatggcttcgaggttggaaagggaatgaattgcaacgttgtatccgaaagaggaaaatggttggaagtagaatgttcgctgatgacctgcacaaccttaataaacgcatccgctatctctacaaacactttaaccgacatgggaagtttcgatagaagagaaagctgagaacttcggaaaaggctcatctgtcaccctggagaanggaaactgtacttttccc

SEQ ID NO: 584 - DNA, 431 bp, Homo sapiens
cactgttgctgttttcagatacaccagaagagggcatcagatctcattatgggtggttgtgagccaccatgtggttgctgggatttgaactcaggaccttcggaagaacagtcagtgctcttaaccactgagccatctctccagcccagatttccttttgatggtgaagcattttaattttaccattttgctttgaaagggcactgctctatgttctggcactatcggtattctggactcctcttcgtaaaacatttctttataacaaaaggtgcacttacttttatttcggtgtgtgttttgcctgcatgaacgacttgacatctcaagcctacctggtgtctggagaggcccgaacaggatgtcagatgccctagaactagagataccgaccgttgtgcgctaccatctgggtgctgggaattgaacta

SEQ ID NO: 585 - DNA, 412 bp, Homo sapiens
aagagagaaagagaacatttttataccaaggagggattgactttcagaaaagagtagacttctctctcctcccttcctccaaaaaaagaagttggaaaccttctgtttttgtgtgtgtgtttttggttgttctttgtttgtttttgtttttgagatggagtctcactctgtcacccacgctactgcagtcagcctgggtgacagagtaagattctgtctcaaaagaaaaaaaaagacagaaaagaaatggactctgatggaaaagatgtgtacaaggctgattatactaagcagagggatatttaaataaatgctaagaagagaggcaggtgaagctccaggggagccatccttcccaaatgttcacttaaattttcagcggtttgggtatgccagatggtgaacctaggta

SEQ ID NO: 586 - DNA, 431 bp, Homo sapiens
aagaaaagggagccaagaagaaagtggttgatccattttctaagaaagattggtatgatgtgaaagcacctgctatgttcaatataagaaatattggaaagacgctcgtcaccaggacccaaggaaccaaaattgcatctgatggtctcaagggtcgtgtgtttgaagtgagtcttgctgatttgcagaatgatgaagttgcatttagaaaattcaagctgattactgaagatgttcagggtaaaaactgcctgactaacttccatggcatggatcttacccgtgacaaaatgtgttccatggtcaaaaaatggcagacaatgattgaagctcacgttgatgtcaagactaccgatggttacttgcttcgtctgttctgtgttggttttactaaaaaacgcaacaatcagatacggaagacctcttatgct

SEQ ID NO: 587 - DNA, 132 bp, Homo sapiens
  misc_feature 90, 128: n = A,T,C or G
aactttcccatggtcaaaggaaaaacaagcaggagttgagtggctggggtggggtgcaggcaatggagagagggcataagggtgtagaanctgaagggggctagaagcttactcctgagcttcttacntccg

SEQ ID NO: 588 - DNA, 425 bp, Homo sapiens
  misc_feature 13, 32, 47, 53, 56, 70, 72, 102, 128, 129, 165, 190, 420: n = A,T,C or G
gggcttcttcaangaacctcagctgaaacctntgggggattactganttgatntgnccaccagaacaggngngctcgcttttgttctgaaatcaaatcctcnaaagaccgggagaaggggtcacccanncgtggatcgttggcattgtgggaaaagggaaaccgnaacggcccggatcattgacaagccncgaagttattgaagtcctgcctcgtggggccacagctgcttgttcttgctcctgacagttcaaatgcctcctttgagcctagctcgtgagatgaaagaacagaagttgtttggaccttagagccattatccacaatcacggatggttctcaagagttgattgtaagaaatttccaaagaaggctgcctgcatagtggttccggctgccctttctaggtgattggaatcancccat

SEQ ID NO: 589 - DNA, 425 bp, Homo sapiens
caacagttattttattaggatgtcagccctgggtccagagtgagagatagggacaggggacagcccagcgaggctgggtcgggggtcactccaggatgttccaaccacaggggcagcatctcctccactccacatgctggccaagggcacagagctgccgtatcgcctgccaagggggtggctcaatgctgctgccctggtcctgtatgggcccggggtgccgagaacagacagcaagcctcaggcgccggtcctttgagctttcttgatttcctcagagagcgcctccttcagctctgcgtaggcctggtccaggctgtcgttaatgatgaccacatcaaacaggccgggctccttgctgctctccatgtcggcctgggcagcagccagccgcttcaccaggctctcctcggtttcagtgttgc

SEQ ID NO: 590 - DNA, 425 bp, Homo sapiens
acaagtatacatataatctagataagggctgtaatgtttcctaatattaattactgtacttaaaaatttacaggacatgaacataaataaagctgtttaaaactggcaaacgtagtaatagtctgtcattcagtacaaggtatatttatgttatttccaaagccatcaccctaaaatcctaagttgccactcttaaaacctaaaaataatgtcgaaaactaaagtcataaatacatgtatacatacatttgcatatttacacttatgcagaaatcatcaatatactagagcccagctttaacactgtccttcagtttcacacagaaggacccctaataactgtaaatatataaatatgtcaggttaaagggaaaaggtgttcagggcacttcttgtcctctctgtcccataacctacctccaccc

SEQ ID NO: 591 - DNA, 425 bp, Homo sapiens
aagtatgtatgtacaagactcaagtaaatagaaaggcagctttcaatcacaaatcagtttttcagattttactgtggaagcatatttaatgcacacatttgaatgttacacataaataattttaacgatggagtccaagttctggattttacattagatctgcatatataagacacttgtggtcaaatttcaagattggtaaagccagtttcaagctgcttatattttgagtacaggtttcactattacaaatatatgatgttaaactaacaaactcatgaccttcaaagatgtcttcgtcccacgcacacacatttgtaatttgtgtccatttgctatttcccttcttctataatcttcaaattatatagttatgcattgagttccctatgcatctcacccatctcctttatctcagccttctc

SEQ ID NO: 592 - DNA, 299 bp, Homo sapiens
agtgaaaatgggttggtttttgtcttcgacgctcagggtctgggcgcctcgcatttgcagtctgttgtgacagacacggggagctccgcgtgccagcctgtggctgccctgctgtgggggtcctggggccggcgaggccccttcagtcttgttctggggggacggcccactccggggagggggtgtgctgtgctgagcgctgtatccctgaatatagtttattttttctacatttgaattctgttgtagatttatgtaaaaatacattctttttgaaaataaaaattttcatgtcttct

SEQ ID NO: 593 - DNA, 425 bp, Homo sapiens
tttttttttctttttcccaggaggcggcgacggcggcggcggggggagaggaagagaaagaagcgtctccagctgaagccaatgcagccctccggctctccgcgaagaagttccctgccccgatgagcccccgccgtgcgtccccgactatccccaggcgggcgtggggcaccgggcccagcgccgacgatcgctgccgttttgcccttgggagtaggatgtggtgaaaggatggggcttctcccttacggggctcacaatggccagaaaagattccgtgaagtgtctgcgctgcctgctctacgccctcaatctgctcttttggaatcatcacattccacttctaaaaggagctttaaagatggcctggttgaacgtccttcctttgtgagtgaggaaattaagtgcagattaagtgacttgcc

SEQ ID NO: 594 - DNA, 425 bp, Homo sapiens
gtcactagctggctaaggcttaaagcagagacgtgtgactgggtctctcgggagggcctctggttcttcccgggctcaggcttgctgggggctgggggccagggctctggcgacctagaggtgtggacggcacagctgcaggaggccttctcttaaccctccgagagtgggactgggagatttcctctgaagtcccaaagaggccctgtgcccaggggacctcctcctcggcctcccaggtgggtggtgcaagctggttcttggccatgctccaggctcgggtgggcacaggcgtccactccagtgtgctgcgtgcttgtgagactgcctgttctgggaccagcccctgggctcttccaccaagatttggtgagggtccccctctgcctctcacagaagcccctggccctggactgtcctggggg

SEQ ID NO: 595 - DNA, 162 bp, Homo sapiens
  misc_feature 43, 102, 126, 154, 158, 160: n = A,T,C or G
ctttacattattttttttccaaaaagactagtatttatacaangggcaatagaaacaaaaacaaaaacccttccgactgccacctggaaggggctggctggnctgctccctctcccacctggaacnggggggggcactgggcaggagggaatgnggangngg

SEQ ID NO: 596 - DNA, 283 bp, Homo sapiens
  misc_feature 17, 106, 111, 115, 120, 127, 131, 144, 150, 153, 155, 160,166, 171, 176, 182, 201, 203, 205, 212, 220, 221, 224, 232,239, 242, 259: n = A,T,C or G
aaggtgactcaacaccntcttcctcaaggacttcttggtgatactctcttgtcttttccagttaccctcttcctcctttgtcctctgtgcttgggctcacaacttnatggnctgnacttnataaaanaacnatggcaactttgncctgantgncnccctncccaanctganctggntggaanaagaaacttggaaactatntnanccatggntttgggannctncccccttncccatgnctnctaataaaaccatgcantgcctttggagagaagagaccccc

SEQ ID NO: 597 - DNA, 426 bp, Homo sapiens
  misc_feature 41, 43, 46, 197, 200, 207, 211, 217, 255, 277, 287, 293,297, 304, 318, 327, 333, 355, 357, 359, 375, 379, 380, 394,405, 407, 409: n = A,T,C or G
gaaatacaaatgtggattctcatcactgaaaaatctttgangntgngtttattcctttcatcattttttaaatattttttttactgcctatgggctgtgatgtatatagaagttgtacattaaacataccctcatttttttcttttcttttttttttttttttttagcccaaagttttagtttctttttcatgatgnggnacctccnaagngatggnagatttaaataattttttatttttattttatatatttnttcattagggccttttctcccnaaaacgaaanaaaaantccnaaaaacnaaacccaaaaaaanagagggtantgtccnagtttctgtatgtataaagtcntncncgatttcaggagagcnctgnncccaatttgctccntgaatcaaggngngnaaatggtttttttggcg

SEQ ID NO: 598 - DNA, 412 bp, Homo sapiens
  misc_feature 241, 262, 300, 309, 312, 318, 327, 329, 385, 390, 399, 402: n = A,T,C or G
tttttttttttttttttttgccacctagagatgataatttattgttttaccatgactcagaagagaaacaacataaagagaatatttcaaatccccacaatttccttctcaacctcactactcttaacatttctttatcagacgccactggcttcctaaaatggaccctggactatgtatggggaccacattcattatgctgcctttcctcttatgattaaaactttagccctcattcganggttccaatggtacttttagnggaggagtccctagcttttaaaaaaaccacttttcctntaaaatccnttntttatngaaaaaaancntttttaaaaatgttaaggaggattttaaatgaccatattcaattaaaaaaaaaatnccttntggaacatnttngcagaaacct

SEQ ID NO: 599 - DNA, 415 bp, Homo sapiens
ccaagatgacaaagaaaagaaggaacaatggtcgtgccaaaaagggccgcggccacgtgcagcctattcgctgcactaactgtgcccgatgcgtgcccaaggacaaggccattaagaaattcgtcattcgaaacatagtggaggccgcagcagtcagggacatttctgaagcgagcgtcttcgatgcctatgtgcttcccaagctgtatgtgaagctacattactgtgtgagttgtgcaattcacagcaaagtagtcaggaatcgatctcgtgaagcccgcaaggaccgaacacccccaccccgatttagacctgcgggtgctgccccacgtcccccaccaaagcccatgtaaggagctgagttcttaaagactgaagacaggctattctctggagaaaaataaaatggaaattg

SEQ ID NO: 600 - DNA, 208 bp, Homo sapiens
  misc_feature 45, 66: n = A,T,C or G
aaaccgccttttttttttttttttttttaatatgcagtttgtaanaacaaaactggatggcatcanaattgtctggaagttttgtcttgggcagtatgggctgggccaaatgaaatgatttttataattctaaacaggttaccaaatgaaatgtcatggctttactttggcaattaaaggggggaatttttttaaaaaaaaaaaaaaa

SEQ ID NO: 601 - DNA, 165 bp, Homo sapiens
  misc_feature 19: n = A,T,C or G
tgcaggtcgacactagtgnatccaaagaaagtaacctaaacttgacctgcttaatacattctagggcagagaacccaggatgggacactaaaaaaatgtgtttatttcattatctgcttggatttatttgtgtttttgtaacacaaaaaataaatgttttgatat

SEQ ID NO: 602 - DNA, 416 bp, Homo sapiens
aaaacggttttgccgagttgggacgtccactgctgtcaagtcaaccagagatttgaactgtgcattggtgtgatccctgaggaaagtcagcactgggatgacgccatcaggatggatacagacctctaactcattgaagcaggacacctgaacttgttggacatacttgggcaagatttcagccacatactctccaaaagctgagagctgcttgtgggccacatcattccgtggtctgacagtggggcgcgtgtcggccccggcgctctcccgcctcaccggcagcaacagaacggagggtcgcccagtccccctggtcagcgccgaggcccccaagatcccgcgccaccacagcctggctaccgccgccgcgagtacttctagagcggccgcgggcccatcgattttccacccgg

SEQ ID NO: 603 - DNA, 416 bp, Homo sapiens
  misc_feature 31, 99, 174, 242, 249, 331, 415: n = A,T,C or G
catgagcataaaaaaaaaacccaaacctgtnccatacccctcccactcatgcaaacagctcttaaaatgaagaattctttcaaaattttacgttttttncattcttggctcaattcttttgctttcctcatcatcagaattcaaactttgggcaaacatgggttttgggctgantctttggaatatgctggaaaaaccccaatatgggctgcttctgcttgtttggcatgacgcaaaatggnttcccangatactgcatcgtcttgccaagaatgttccattagaaaaaggcccgggtcctcgccacactggctggcctctgctgggtgcntctagagtatatcggctgcacctcagtgcatctgtccataatttttttgaaaaaaaaaactcaatcttaacgcgggcatattcnc

SEQ ID NO: 604 - DNA, 414 bp, Homo sapiens
  misc_feature 291, 359, 367, 369, 371, 374, 381, 383, 387, 400: n = A,T,C or G
aaaatttatgagctttattaaagcggtttatcacaaagatggaaacgtacaaatgagaagcatgcaaccatcatcttccacagtcaagtcaaactgctatttctctctctctcctgtttcatagagctggaaactgcaggtgttatacccaacctattcatcctcaacactgtagtcacgccccggaaactactcagggcaccaaacatccaaaacataaactattattatacaaagaaagtgcaaagttaaaaaagaaaacatggagacccctcccccccataccctcanctaaaggctaacaatggcacttgggctcttgcttaatctagattgtcttcaaaaagtctctaaaatgngatactgngngnggnggggggngngaanggtccaaaagctncttagtgtttgaaa

SEQ ID NO: 605 - DNA, 417 bp, Homo sapiens
tcctctttcacaatcactcaacaaacaggtcacacatcccctaggtccacgaactcatcttctcgtttggccaaatcgtcttcatctcccaaagctttccagccactggtgggtaagacgggcttagaggaatgtcgctggagcagagcgaaaggaaacaaagacgagaggcgggcagagttcctcagcaggcagggggcctcagcctggggggcctgctggctgtggtgtctctcgtcgatcttctcttgtaaactctggacttcctccatcatttccaagagtttgctcagagtggccacttggccaccacctaggatttgggcttctggaatccaacgtaggtagcgctgggcccagactttgatttcgggcccctcgatatgcggtaacaacaaaccatggtagtcagtggac

SEQ ID NO: 606 - DNA, 413 bp, Homo sapiens
ctgaattctttaatttaaaaaaatcatacctaggaggtgtgctataggaattcagatacaataagttgcatataaaacccgacctcattgctcattgtggtaaagcaaggatgatgagaaaatgcacctcaggagcaaaaacacgctttacgggcactccgggacccaagtcccgagacatttccacgtgaccttctggaaagacacaccgcccacctgactgcacgacgggactggtccagcctcccggctcctcaggaaggagatgagtttcctacaaagtgagtggccacagctccaggacagggcgtccacatgtcgttgtgggtctggctggattttgaggtgccgaggaactggtcggtgtcctgatcgtattgtacgtggtgctctcgatctcccaactgccataa

SEQ ID NO: 607 - DNA, 414 bp, Homo sapiens
  misc_feature 376, 384: n = A,T,C or G
attttcattaaaactgtcagaatttgcttactataattatgatacagtccaaagaatgcagtcactttttatcatgttaactaattgttctcttttgaagatctatggttgactaattaaacaataattcaagtagagtgtcccagaaaaaaaccacttgggctccctgtttggagtctggctggctctgagcattgccaatggcccctactcacctgactttgtatcctctccttttagaggctttgcattctgcacccagcttcactaacagtgggctgaaaacatccttgggttgagtgtttcatttgggagttatttggccagggccttttgaacagtaagtgtccccatgaagtgctagataatatatggngtaaagangtcagctttttttttttttttaactctaac

SEQ ID NO: 608 - DNA, 415 bp, Homo sapiens
  misc_feature 22, 288, 307, 310, 322, 336, 340, 343, 352, 353, 372, 381,395, 408: n = A,T,C or G
gcagtggtctgatcttaagggnctatatatttgcacctcctcattcaacacagggctggaggttctacaacaggaaatcaggcctacagcatcctgtgtatcttgcagttgggatttttaaacatactataaagtctgtgttggtatagtacccttcataaggaaaaaatgaagtaatgcctataagtagcaggcctttgtacctcagtgtgaagagaaatcaagagatgctaaaagctttacaatggaagtggcctcatggatgaatccggggtatgagcccagganaacgtgctgctttttggtnacntatccctttttntcttaagaaagcanggtnctntcttattannaaatatgttaaaaaatggnaagcaaacnacaggtgcctttanaaattaccaattnttaactt

SEQ ID NO: 609 - DNA, 420 bp, Homo sapiens
ggttttaaaattatttcttgaatctctccatacacaggcaaaaataagtgtgttacttaacatactggaaattgcctaacttaatcattgcctaaagaagagaaaattatccccaaaacgtgcttaaccaggaggccaatgcatttgccgacctccaagaacatggagatgaacgtgatagacagactgtccaccatctgaaccttcattcaccaccattcgataacccttattcaggcccagatcagcagcacatttcttgccaacaatcattaagtgtccaagaagactttcatcatcatcttctgccacagaaatctgggatatatgtttcttgggtatcaccagaaaatgtgttggtgcttgaggggaaatgtcatggaaagcaaggcaccggtcatccttaaaaatgattttggc

SEQ ID NO: 610 - DNA, 158 bp, Homo sapiens
  misc_feature 25, 29, 31, 37, 66, 83, 86: n = A,T,C or G
caactttaaaaaaaagggggcggtnaaananccaaanataaaaaggtccctttggtggataaaggnccctttccgggaccggnccnggacccacctttgggcccaaagggggatttaccgggtaaaccaagcctttaaagcgttgggggttaaatttc

SEQ ID NO: 611 - DNA, 159 bp, Homo sapiens
  misc_feature 132, 147, 152, 154: n = A,T,C or G
tcgacactagtggatccaaaggaagatggcggacattcagactgagcgtgcctaccaaaagcagccgaccatctttcaaaacaagaagagggtcctgctgggagaaactggcaaggagaagctcccgcggtnctacaagaacatcgntctgngnttcaa

SEQ ID NO: 612 - DNA, 419 bp, Homo sapiens
gcattttttattaagacatttggggcccgagtttcctctcctcctcccctccatcctgtgctctctaaattcagcttttggaaacctaagtgtgcccaccttccccagcaggtagccagagcctccggggtccctcttccttccttctttctccccagatactgcaagagacacccaagtctgctgtcagcagagggtgaagcgtctggcactgatgttcatgcgcgtgagtcccagatgccgcagcggtggggccagaggcaagccagtcccagactctaactccatctccagctcagcctcatccagaagctcctggtgcaggtgacagacttggtccactttcagtctgtgcagccgggcccgcagcctgagcagctgccctgccagctgccggtcctgagcccgcatctcctgca

SEQ ID NO: 613 - DNA, 419 bp, Homo sapiens
  misc_feature 395: n = A,T,C or G
ccccatactgaggcatataaagtttgcaaaaccaaggggcctgtcttcccaaggtcttactataaaatctgggttaggctaaaacttattatgtagaccagagaggcgttgattttaaaccaatcatcctgtctcatcttcattatttctggctttatgagcagaatgtcctgctacctttggcttcttataaagatctttaatggagtattttaaacattggaaaatccatgagtttgagcttatttggagaatgctgctaagaatgggattgactgacataacttactagcctctttcctgcttgaggtacagcagttttcaatcccaatgtgtaaagtgcttagaagttatcactccccaccttagagcaaaaaccttcagagaacttcagncactccaccaggcaaatagcacct

SEQ ID NO: 614 - DNA, 123 bp, Homo sapiens
  misc_feature 2, 37, 74, 76, 87, 88, 91, 96, 105, 112, 117, 121: n = A,T,C or G
gnggtatggactagaaaacttggaatgactcatgaanaaaccttggaatgacacatgaagcatgatagggaaantnattctgaggcnngangcttnactgaattntttccanccagnggtntt

SEQ ID NO: 615 - DNA, 362 bp, Homo sapiens
gaccttgaggtttcatcgggtgattgcccttgatttcttaggctttggcttcagtgacaaaccgagaccacatcactattccatatttgagcaggccagcatcgtggaagcgcttttgcggcatctggggctccagaaccgcaggatcaaccttctttctcatgactatggagatattgttgctcaggagcttctctacaggtacaagcagaatcgatctggtcggcttaccataaagagtctctgtctgtcaaatggaggtatctttcctgagactcaccgtccactccttctccaaaagctactcaaagatggaggtgtgctgtcacccatcctcacacgactgatgaacttctttgtat

SEQ ID NO: 616 - DNA, 210 bp, Homo sapiens
  misc_feature 156, 181, 194: n = A,T,C or G
tgatgccaccccgtcacccctcccctcctgagcagggatccaagaatgtgccaagagtcccgccagcctcagccaggtgggcctgtatatagggtccatgtgcaatagggagggacgtcttctattttttgctgccccctccccgcccactgtctnggggcagggggagaaggtattttcnagataaagcacangcaccacaaataaaag

SEQ ID NO: 617 - DNA, 511 bp, Homo sapiens
acgagctttcgtggctcactccctttcctctgctgccgctcggtcacgcttgtgcccgaaggaggaaacagtgacagacctggagactgcagttctctatccttcacacagctctttcaccatgcctggatcacttcctttgaatgcagaagcttgctggccaaaagatgtgggaattgttgcccttgagatctattttccttctcaatatgttgatcaagcagagttggaaaaatatgatggtgtagatgctggaaagtataccattggcttgggccaggccaagatgggcttctgcacagatagagaagatattaactctctttgcatgactgtggttcagaatcttatggagagaaataacctttcctatgattgcattgggcggctggaagttggaacagagacaatcatcgacaaatcaaagtctgtgaagactaatttgatgcagctgtttgaagagtctgggaatacagatatagaaggaatcgacacaactaatgcatgctat

SEQ ID NO: 618 - DNA, 511 bp, Homo sapiens
acgaggccacagaggcggcggagagatggccttcagcggttcccaggctccctacctgagtccagctgtccccttttctgggactattcaaggaggtctccaggacggacttcagatcactgtcaatgggaccgttctcagctccagtggaaccaggtttgctgtgaactttcagactggcttcagtggaaatgacattgccttccacttcaaccctcggtttgaagatggagggtacgtggtgtgcaacacgaggcagaacggaagctgggggcccgaggagaggaagacacacatgcctttccagaaggggatgccctttgacctctgcttcctggtgcagagctcagatttcaaggtgatggtgaacgggatcctcttcgtgcagtacttccaccgcgtgcccttccaccgtgtggacaccatctccgtcaatggctctgtgcagctgtcctacatcagcttccagcctcccggcgtgtggcctgccaacccggctcccattacccag

SEQ ID NO: 619 - DNA, 413 bp, Homo sapiens
gaattcggcacgagctggacaggagaagagcctggctgctgaaggcagggctgacacgaccacgggcagcattgctggagccccagaggatgaaagatcgcagagcacagccccccaggcaccagagtgcttcgaccctgccggaccggctgggctcgtgaggccgacatctggcctttcccagggcccaggaaaggaaaccttggaaagtgctctaatcgctctagactctgaaaaacccaagaaacttcgcttccacccaaagcagctgtacttctctgccaggcagggtgagctgcagaaggtgcttctcatgctggttgatggaattgatcccaacttcaaaatggagcaccaaagtaagcgttccccattacatgctgctgcggaggctggccacgtggacatctgcc

SEQ ID NO: 620 - DNA, 415 bp, Homo sapiens
gaattcggcacgagcggcgacggtggtggtgactgagcggagcccggtgacaggatgttggtgttggtattaggagatctgcacatcccacaccggtgcaacagtttgccagctaaattcaaaaaactcctggtgccaggaaaaattcagcacattctctgcacaggaaacctttgcaccaaagagagttatgactatctcaagactctggctggtgatgttcatattgtgagaggagacttcgatgagaatctgaattatccagaacagaaagttgtgactgttggacagttcaaaattggtctgatccatggacatcaagttattccatggggagatatggccagcttagccctgttgcagaggcaatttgatgtggacattcttatctcgggacacacacacaaatttgaag

SEQ ID NO: 621 - DNA, 421 bp, Homo sapiens
  misc_feature 8: n = A,T,C or G
agaattcngcacgagtggcagcctaagccgtgggagggttccagtcgagaatgggaagatgaaagacttcagatggaacagaaataaatgccttttttgacaaacgcagcagtgcgtgcctctagcttgcaagagcgttactccccttcatagctttaaaaggttttcgcactgcgtgcagttagagtagctaaatcttgtgtgacgctccacaaacacttgtaagaattttgcagagaaagataaccgttgccacccaatgccccccacaggcattctactccccagtacctcttagggtgggagaaatggtgaagagttgttcctacaacttgctaacctagtggacagggtagtagattagcatcatccggatagatgtgaagaggacggctgtttggataataattaaggataaaat

SEQ ID NO: 622 - DNA, 431 bp, Homo sapiens
  misc_feature 8, 11, 17: n = A,T,C or G
cccggggnggncctggncataaaactttaaattttactagtgttacttaatgtatattctaaaaagagaatgcagtaactaatgccctaaatgtttgatctctgtttgtcattactttttcaaaattatttttttctgtaaagtataatatataaaacttcttgcttaaattgaatttctatattagtggttaattgcagtttattaaagggatcattatcagtaatttcatagcaactgttctagtgttttgtgtttttaaaacagaattaggaatttgagatatctgattatatttttcatatgaatcacagacctcggccgcgaccacgctaagggcgaattccagcacactggcggccgctactagtggatccgagctcggtaccaagcttgggcgtaatcatggtcatagcctgtttcctgtgtga

SEQ ID NO: 623 - DNA, 421 bp, Homo sapiens
  misc_feature 81, 101, 103, 107, 111, 112, 180, 309, 331, 388, 404, 415: n = A,T,C or G
agaattcggcacgaggaaacatggactgccccttaaattttgactgtcctaaaaacctatttctgatttataatatgctgnctgataaagtgacactagangnaccnactnnatggtttaaatcttcccattcccagaatccagaattttggaagccattttaaccaggggtattttttncaccattaccttttggaactttccaaattaatggccttttaaaaaggttggaaggggaaaaccaaaaggccaaaattttaaaaaggttgggggggggaaccttaaaaaaaaaaatgggttttggggccncctttttttaaaaggccaaaanttttttgggttccaattaaaaaaatttcctttttccaacccaaaattaagaaaaggnaaaattaaaaaaattncaaaaattggntttttt

SEQ ID NO: 624 - DNA, 421 bp, Homo sapiens
aagaattcggcacgagcggatgtgctcactgacattctactccaagtcggagatgcagatccactccaagtcacacaccgagaccaagccccacaagtgcccacattgctccaagaccttcgccaacagctcctacctggcccagcacatccgtatacactcaggggctaagccctacagttgtaacttctgtgagaaatccttccgccagctctcccaccttcagcagcacacccgaatccacactggtgatagaccatacaaatgtgcacacccaggctgtgagaaagccttcacacaactctccaatctgcagtcccacagacggcaacacaacaaagataaacccttcaagtgccacaactgtcatcgggcgtacacggatgcagcctcactagaggtgcacctgtctacgcacaca

SEQ ID NO: 625 - DNA, 421 bp, Homo sapiens; identical to SEQ ID NO: 195

SEQ ID NO: 626 - DNA, 476 bp, Homo sapiens; identical to SEQ ID NO: 196

SEQ ID NO: 627 - DNA, 503 bp, Homo sapiens; identical to SEQ ID NO: 197

SEQ ID NO: 628 - DNA, 248 bp, Homo sapiens
taagtccagggggaataactgtaggcattcctggaatcactgtcttctgttccattgtgtcttggttccagcggctcctcttccgcttcttacttgggaagtccaacggcgtggcgttcgctccggtcgccatggcgcccccggggacaggcaccggcacctgcttttcctctgcggcggcttctccttcgcaagcctcccggggggaggggacccgaatgcgctgccggagcgcgcggagcccgtcc

SEQ ID NO: 629 - DNA, 99 bp, Homo sapiens
actgccagtccaaaggcatcgtggtgaccgcctacagccccctcggctctcctgacaggccctgggccaagcccgaggacccttctctcctggaggatc

SEQ ID NO: 630 - DNA, 640 bp, Homo sapiens
gaagacatgatgctacactcagctttgggtctctgcctcttactcgtcacagtttcttccaaccttgccattgcaataaaaaaggaaaagaggcctcctcagacactctcaagaggatggggagatgacatcacttgggtacaaacttatgaagaaggtctcttttatgctcaaaaaagtaagaagccattaatggttattcatcacctggaggattgtcaatactctcaagcactaaagaaagtatttgcccaaaatgaagaaatacaagaaatggctcagaataagttcatcatgctaaaccttatgcatgaaaccactgataagaatttatcacctgatgggcaatatgtgcctagaatcatgtttgtagacccttctttaacagttagagctgacatagctggaagatactctaacagattgtacacatatgagcctcgggatttacccctattgatagaaaacatgaagaaagcattaagacttattcagtcagagctataagagatgatggaaaaaagccttcacttcaaagaagtcaaatttcatgaagaaaacctctggcacattgacaaatactaaatgtgcaagtatatagattttgtaatattactatttagtttttttaatgtgtttg

SEQ ID NO: 631 - protein, 168 aa, Homo sapiens
EDMMLHSALGLCLLLVTVSSNLAIAIKKEKRPPQTLSRGWGDDITWVQTYEEGLFYAQKSKKPLMVIHHLEDCQYSQALKKVFAQNEEIQEMAQNKFIMLNLMHETTDKNLSPDGQYVPRIMFVDPSLTVRADIAGRYSNRLYTYEPRDLPLLIENMKKALRLIQSEL

SEQ ID NO: 632 - DNA, 402 bp, Homo sapiens
  misc_feature 285, 390: n = A,T,C or G
gcccggacgtaggtagtttgttgggccgggttctgaggccttgcttctctttacttttccactctaggccacgatgccgcagtaccagacctgggaggagttcagccgcgctgccgagaagctttacctcgctgaccctatgaaggcacgtgtggttctcaaatataggcattctgatgggaacttgtgtgttaaagtaacagatgatttagtttgtttggtgtataaaacagaccaagctcaagatgtaaagaaaattgagaaattccacagtcaactaatgcnacttatggtacccaaggaagcccgcaatgttaccatggaaactgagtgaatggtttgaaatgaaactttgtcgtgtacttaggaagtaaatatcttttgaattanaaaaagtgttgg

SEQ ID NO: 633 - DNA, 402 bp, Homo sapiens
  misc_feature 278, 387: n = A,T,C or G
gcggagtcgggtgggttggcggctataaagctggtagcgaaggggaggcgccgcggactgtcctttcgtggctcactccctttcctctgctgccgctcggtcacgcttgctctttcaccatgcctggatcacttcctttgaatgcagaagcttgctggccaaaagatgtgggaattgttgcccttgagatctattttccttctcaatatgttgatcaagcagagttggaaaaatatgatggtgtagatgctggaaagtataccattggcttgggccangccaagatgggcttctgcacagatagagaagatattaactctctttgcatgactgtggttcagaatcttatggagagaaataacctttcctatgattgcattgggcggntggaagttggaacag

SEQ ID NO: 634 - DNA, 386 bp, Homo sapiens
  misc_feature 27, 354, 363, 368, 369, 375: n = A,T,C or G
tgcaggtcgacactagtggatccaaanaattcggcacgaggctggcaagaagagacgaggcccggctgtggagcaactgaaccgggtgactgtcccaagctggactccctggtggcccagcagctgcagagcaagaatgagtgtggaatccttgccgaccccaaggggcccttccgggagtgccatagcaagctggacccccagggtgccgtgcgcgactgtgtctatgaccgctgcctgctgccaggccagtctgggccactgtgtgacgcactggccacctatgctgctgcatgccaggctgctggagccacagtgcacccctggaggagtgaagaactttgcccacttganctgccaccncacanncctatnaggcgtgttct

SEQ ID NO: 635 - DNA, 404 bp, Homo sapiens
gccaccacttcgtagtgttttggaacaaaccaagttaaagaaagaagatatttatgcagtggagatagttggtggtgctacacgaatccctgcggtaaaagagaagatcagcaaatttttcggtaaagaacttagtacaacattaaatgctgatgaagctgtcactcgaggctgtgcattgcagtgtgccatcttatcgcctgctttcaaagtcagagaattttctatcactgatgtagtaccatatccaatatctctgagatggaattctccagctgaagaagggtcaagtgactgtgaagtcttttccaaaaatcatgctgctcctttctctaaagttcttacattttatagaaaggaacctttcactcttgaggcctactacagctctcctcaggatttgc

SEQ ID NO: 636 - DNA, 403 bp, Homo sapiens
  misc_feature 321: n = A,T,C or G
gctcactggtccccagtgccctgctggagcaagcctatgctgtgcagatggacttcaacctgctagtggatgctgtcagccagaacgctgccttcctggagcaaactctttccagcaccatcaaacaggatgactttaccgctcgtctctttgacatccacaagcaagtcctaaaagagggcattgcccagactgtgttcctgggcctgaatcgctcagactacatgttccagcgcagcgcagatggctccccagccctgaaacagatcgaaatcaacaccatctctgccagctttgggggcctggcctcccggaccccanctgtgcaccgacatgttctcagtgtcctgagtaagaccaaagaagctggcaagatcctctctaataatcccagcaagggact

SEQ ID NO: 637 - DNA, 441 bp, Homo sapiens
  misc_feature 24: n = A,T,C or G
aggtcgacactagtggatccaaanaattcggcacgaggagagagaccctaaaagcaaaaatagaagggatgacccaaagtctgagaggtctggaattagatgttgttactataaggtcagaaaaagaaaatctgacaaatgaattacaaaaagagcaagagcgaatatctgaattagaaataataaattcatcatttgaaaatattttgcaagaaaaagagcaagagaaagtacagatgaaagaaaaatcaagcactgccatggagatgcttcaaacacaattaaaagagctcaatgagagagtggcagccctgcataatgaccaagaagcctgtaaggccaaagagcagaatcttagtagtcaagtagagtgtcttgaacttgagaaggctcagttgctacaaggccttgatgaggccaaaaataattatattgtttgca

SEQ ID NO: 638 - DNA, 404 bp, Homo sapiens
  misc_feature 324, 353, 371: n = A,T,C or G
gcgctgccgccgattccggatctcattgccacgcgcccccgacgaccgcccgacgtgcattcccgattccttttggttccaagtccaatatggcaactctaaaggatcagctgatttataatcttctaaaggaagaacagaccccccagaataagattacagttgttggggttggtgctgttggcatggcctgtgccatcagtatcttaatgaaggacttggcagatgaacttgctcttgttgatgtcatcgaagacaaattgaagggagagatgatggatctccaacatggcagccttttcttagaacaccaaagattgtctntggcaaagactataatgtaactgcaactncagctggcattatcacgntggggacgtcagaagaaggagaaagccgcttat

SEQ ID NO: 639 - DNA, 404 bp, Homo sapiens
  misc_feature 368, 375, 382, 384: n = A,T,C or G
gcatgtaccgagcacttcggctcctcgcgcgctcgcgtcccctcgtgcgggctccagccgcagccttagcttcggctcccggcttgggtggcgcggccgtgccctcgttttggcctccgaacgcggctcgaatggcaagccaaaattccttccggatagaatatgatacctttggtgaactaaaggtgccaaatgataagtattatggcgcccagaccgtgagatctacgatgaactttaagattggaggtgtgacagaacgcatgccaaccccagttattaaagcttttggcatcttgaaacgagcggccgctgaagtaaaccaggattatggtcttgatccaaaaattgctaatgcaataatgaangcagcanatgaagnanctgaaggtaaataaaatgat

SEQ ID NO: 640 - DNA, 401 bp, Homo sapiens
ggccaagtcagcttcttctgagagagtctctagaagacatgatgctacactcagctttgggtctctgcctcttactcgtcacagtttcttccaaccttgccattgcaataaaaaaggaaaagaggcctcctcagacactctcaagaggatggggagatgacatcacttgggtacaaacttatgaagaaggtctcttttatgctcaaaaaagtaagaagccattaatggttattcatcacctggaggattgtcaatactctcaagcactaaagaaagtatttgcccaaaatgaagaaatacaagaaatggctcagaataagttcatcatgctaaaccttatgcatgaaaccactgataagaatttatcacctgatgggcaatatgtgcctagaatcatgttt

SEQ ID NO: 641 - DNA, 404 bp, Homo sapiens
  misc_feature 170, 227, 252, 261, 285, 329, 341, 361, 367, 382, 386, 387,391, 395, 401: n = A,T,C or G
ggctcatcgcagacaccagccgacctaccggctttcggaccatggccaacctcgagcgtaccttcattgccatcaagccagatggcgtgcagcgcggcctggtgggcgagatcatcaaacgattcgagcagaaggggttccgctggtggccatgaagttccttcgggctnttgaagaacacctgaacagcattacatcgaccctgaacgaaccgtcctttctttccnggggctggtgaaatacatgaacttnggggccatngtgggcatgggcttgggaaggggntcaatggtggtggaaaaccggcccgaatgattcttggggggaanaacaaatccaanttgatttaaaaaccaggcanccattnccgggggggattttnttgnntttnaaanttgggnagg

SEQ ID NO: 642 - DNA, 366 bp, Homo sapiens
  misc_feature 26: n = A,T,C or G
tgcaggtcgacactagtggatccaantaattcggcacgaggagcaaaggcacatcttaaatggcaggggaactacccttgatacaaccatcagatctcatgagactcactgtcatgagaacagcagcatgggggtaacggccccatgattcaattacctcccactgagtccctcccacgacatatggggattatgggagctacaattcaagatgagatttaggtggggacacagccaaaccatttcaatagcataacaccaaaaaaggttatagagcagtaaaagggttgatggaccatgcatcagtaataataataataattataagtgatctttaaacattcatcaggtgccaagcctcgtgcc

SEQ ID NO: 643 - DNA, 403 bp, Homo sapiens
  misc_feature 145, 172, 174, 186, 187, 188, 193, 199, 200, 203, 205, 206,211, 213, 216, 218, 221, 229, 234, 239, 248, 251, 253, 256,257, 263, 264, 269, 272, 298, 314, 336, 339, 356, 365, 370,392, 394: n = A,T,C or G
gtgacctgatgagacagttaattatggccaatccacaaatgcagcagttgatacagagaaatccagaaattagtcatatgttgaataatccagatataatgagacaaacgttggaacttgccaggaatccacaatgatgcagganaagatgaagaaccaagacccaactttnancaacctaaaaannnttccnaggggnnttnanngtttnanggncnttntccccaanttttnagganccattgttnatngntgnncaaaannagttnggnggaaatccttttgtttccttggggancaatacatcctttggngaaggtagtcaaccttcccgtncanaaattagaaatcccctncccaatccntgggntccacaaacttcccaaagttantnagtttccac

SEQ ID NO: 644 - DNA, 403 bp, Homo sapiens
  misc_feature 117, 119, 124, 130, 131, 132, 136, 139, 141, 144, 148, 149,150, 155, 158, 159, 161, 163, 164, 165, 168, 169, 174, 176,177, 180, 183, 185, 193, 194, 199, 201, 203, 204, 209, 220,233, 235, 242, 248, 251, 265, 275, 282, 287, 294, 297: n = A,T,C or G
  misc_feature 307, 311, 373, 378: n = A,T,C or G
ggggatgacagccctaacaagaactgtttttgaatcgttgtgcagctccaggcaatagagtatgtgaagcgatttcagtagaatcacttactcatcctaaaagaaaacattattccnantaccntccttnnnattnccntnttntaannnaaacntanngntnnntgnntgttnannggnatnanctttaaanntgcantntnntttantcctccaaatntttttcggtttcntntgagaancaccanaanctttctttcccttntcttcagtanttgcaanagganacctccnttnaggactggcntagngaacgtaatccatgctttaactgccattaaacagccccatggttggattttttttttttttngagtnggctttccaaaaccttgtcaaaaac

SEQ ID NO: 645 - DNA, 405 bp, Homo sapiens
  misc_feature 205, 223, 262, 281, 339, 357, 369, 374, 387: n = A,T,C or G
gcgccttccaggccgcactccagagccaaaagagctccatggcggcggcggccaagcccaacaacctttccctggtggtgcacggaccgggggacttgcgcctggagaactatcctatccctgaaccaggcccaaatgaggtcttgctgaggatgcattctgttggaatcttgtggcttaaatgtcactactgggagtatgggcnaattgggaattttattgngaaaaacccatggggttggacatgaagttcggacagtcnaaaaagtgggatcatcggnaaagacctaaaaccaggtgatcggttgcatcacctgggctcccgaaaaatgataattntgaagatggccatacatntgtaccttcatnttttntggcacccccccnatacggaactttgcggtt

SEQ ID NO: 646 - DNA, 412 bp, Homo sapiens
  misc_feature 378: n = A,T,C or G
ggaacccagtgcctgcagccatggctcccggccagctcgccttatttagtgtctctgacaaaaccggccttgtggaatttgcaagaaacctgaccgctcttggtttgaatctggtcgcttccggagggactgcaaaagctctcagggatgctggtctggcagtcagagatgtctctgagttgacgggatttcctgaaatgttggggggacgtgtgaaaactttgcatcctgcagtccatgctggaatcctagctcgtaatattccagaagataatgctgacatggccagacttgatttcaatcttataagagttgttgcctgcaatctctatccctttgtaaagacaagtggcttctccaggtgtaactgttgaggangctgtgggagcaaattgacattggtgggagtaac

SEQ ID NO: 647 - DNA, 412 bp, Homo sapiens
  misc_feature 55, 56, 61, 63, 68, 79, 90, 136, 137, 159, 160, 163, 205,219, 223, 314, 373, 384, 388, 400: n = A,T,C or G
ggtcgcccggcgccccagcccggccgcggcgctccccgcctccccgctagcgcanncggcngntctgntcggctgattnccagctatganacaaggagaatgaaaatatgaagaaaaagctgaacaaaaaagttanntagctaaaacaggacttgcagnnttnaaaacaggtccttgatggcaaagaagaggttgagaaacaacntagagaaaatattnaaantctaaattccatggtagaacgccaagagaaagatcttggccgtcttcaggtagacatggatgaacttgaagaaaagaaccgaagtattcangctgcctggatagtgcatacaaagaacttactgatctttacaaagccaatgctgcaaangatagtgaggnacangaagctgctctnaccgtgaaatga

SEQ ID NO: 648 - DNA, 413 bp, Homo sapiens
  misc_feature 158, 165, 181, 196, 205, 211, 220, 269, 271, 278, 279, 281,284, 298, 300, 304, 307, 308, 311, 312, 323, 335, 346, 353,354, 359, 382, 385, 387, 389, 391, 396, 397, 398, 399, 404: n = A,T,C or G
ggtcgcccggcgccccagcccggccgcggcgctccccgcctccccgctagcgcagcccggcggctctgcccggctgccgcccggcatgaacatcatggatttcaacgtgaagaaacttggcgggccgaccgggcaccttttcttaagccggcccgtgnaatttanaaaaaaaaaacttggncaagcaaaaaaaaanaaaattggnccttancttgaaaancttcttaacaaaacttaatggtccaaaatattgaccgaaaaaaaaatgnancaaaccnnantgnttttgcacccaatncnaatnccnngannaaaaaaattgnttattaaaaacntgaataaaaanccccaannctatnaacaaccccgaactttttggacnatntntnantgatnnnngaacntaatttggc

SEQ ID NO: 649 - DNA, 409 bp, Homo sapiens
  misc_feature 18, 34, 40, 281, 348, 351, 358, 365, 370, 386, 392: n = A,T,C or G
actagtggatccaaaganttcggcacgagggcanggtgtncgggcgggaaggggcacgggcacccccgcggtcctcgggaggctagagatcatggaagggaagtggttgctgtgtatgttactggtgcttggaactgctattgttgaggctcatgatggacatgatgatgatgtgattgatattgaggatgaccttgacgatgtcattgaagaggtagaagactcaaaaccagataccactgctcctccttcatctcccaaggttacttacaaagctccanttccaacaggggaagtatattttgctgattcttttgacagaggaactctgtcagggtggattttatncanagccaanaaagacnatccnatgatgaaaattgccnaatatnatggaaaagtgggaggt

SEQ ID NO: 650 - DNA, 413 bp, Homo sapiens
  misc_feature 404: n = A,T,C or G
ggcctgaggaccggcaacatggtgcggtcggggaataaggcagctgttgtgctgtgtatggacgtgggctttaccatgagtaactccattcctggtatagaatccccatttgaacaagcaaagaaggtgataaccatgtttgtacagcgacaggtgtttgctgagaacaaggatgagattgctttagtcctgtttggtacagatggcactgacaatcccctttctggtggggatcagtatcagaacatcacagtgcacagacatctgatgctaccagattttgatttgctggaggacattgaaagcaaaatccaaccaggttctcaacaggctgacttcctggatgcactaatcgtgagcatggatgtgattcacatgaaacaataggaaagaagtttgagaanaagcatatt

SEQ ID NO: 651 - DNA, 441 bp, Homo sapiens
  misc_feature 17: n = A,T,C or G
ctagtggatccaaaganttcggcacgaggcaaccagtgacactgcagggagaaatgctcttcacctggctgctaagtatggacatgcattgtgcctacaaaaacttctacagtacaattgtcccactgagcatgcagacctgcagggaagaactgcacttcacgatgccgcaatggcagattgtccttctagcatacagctgctttgtgaccatggggcctctgtgaatgccaaagatgtagacgggcggacaccacttgttctggctactcagatgagtaggccaacaatgtgtcaactgctgatagatagaggagcggatgttaattccagagacaaacaaaacagaactgccctcatgctaggttgcgaatatggttgcagagatgcagtagaagtcttaattaaaaatgggtgctgatataagcttgctggatgcgc

SEQ ID NO: 652 - DNA, 412 bp, Homo sapiens
gcttctctctcctgtgcaaaatggcaactcttaaggaaaaactcattgcaccagttgcggaagaagaggcaacagttccaaacaataagatcactgtagtgggtgttggacaagttggtatggcgtgtgctatcagcattctgggaaagtctctggctgatgaacttgctcttgtggatgttttggaagataagcttaaaggagaaatgatggatctgcagcatgggagcttatttcttcagacacctaaaattgtggcagataaagattattctgtgaccgccaattctaagattgtagtggtaactgcaggagtcccgtcagcaagaaggggagagtcggctcaatctggtgcagagaaatggtaatgtcttcaaattcattattcctcagatccgcaagtacagtcctg

SEQ ID NO: 653 - DNA, 414 bp, Homo sapiens
gccagttcaagtccaccctgccggacgccgatagggagcgcgaggccatcctggccatccacaaggaggcccagaggatcgctgagagcaaccacatcaagctgtcgggcagcaacccctacaccaccgtcaccccgcaaatcatcaactccaagtgggagaaggtgcagcagctggtgccaaaacgggaccatgccctcctggaggagcagagcaagcagcagtccaacgagcacctgcgccgccagttcgccagccaggccaatgttgtggggccctggatccagaccaagatggaggagatcgggcgcatctccattgagatgaacgggaccctggaggaccagctgagccacctgaagcagtatgaacgcagcatcgtggactacaaagcccaacctggaccttgttgga

SEQ ID NO: 654 - DNA, 404 bp, Homo sapiens
gcatggcggagctgacggtggaggttcgcggctccaacggggctttctacaagggatttatcaaagatgtccacgaagactccctcacagttgtttttgaaaataattggcaaccagaacgccaggttccgtttaatgaagtgcgattaccaccaccacctgatataaaaaaagaaattagtgaaggagatgaagtagaggtatattcaagagcaaatgaccaagagccatgtggatggtggctggctaaagttcggatgatgaaaggcgagttttatgtcattgaatatgctgcttgtgatgccacttacaatgaaatagtcacatttgaacgacttcggcctgtcaatcaaaataaaactgtcaaaaaaaataccttctttaagtgcacagtggatgttcct

SEQ ID NO: 655 - DNA, 402 bp, Homo sapiens
gggcaagatcaccattagcaaatggaaattacatttgaaagccattagacttataggtgatgcaagcatctaagagagaggttaatcacactatagaggcataagtggtatcagttttcatttttctaattgtttaaactgtgttttataccagtgtttgcaagtaattgggtgttagcttgagatggttaaaggtggtttggggagggacttcgttgtaatggttttgctgtaaaaaatgtttccaactccgctgaaatgttgctgaaaagcatggtgctggtaacagttcaacaatccgtggctgctcattcttgcctactttactctcccactgaagcaggttagcgtttgaaggtggtatggaaaacctgcatgcctgttcaattcttttgtttcttc

SEQ ID NO: 656 - DNA, 416 bp, Homo sapiens
gaatcggcacgaggtcagccgcgaggtgtccggcatcaaggccgcctacgaggccgagctcggggatgcccgcaagacccttgactcagtagccaaggagcgcgcccgcctgcagctggagctgagcaaagtgcgtgaggagtttaaggagctgaaagcgcgcaataccaagaaggagggtgacctgatagctgctcaggctcggctgaaggacctggaggctctgctgaactccaaggaggccgcactgagcactgctctcagtgagaagcgcacgctggagggcgagctgcatgatctgcggggccaggtggccaagcttgaggcagccctaggtgaggccaagaagcaacttcaggatgagatgctgcggcgggtggatgctgagaacaggctgcagaccatgaaggaggaac

SEQ ID NO: 657 - DNA, 402 bp, Homo sapiens
  misc_feature 150, 153, 154: n = A,T,C or G
gctccaagcagacacaatggtaagaatggtgcctgtcctgctgtctctgctgctgcttctgggtcctgctgtcccccaggagaaccaagatggtcgttactctctgacctatatctacactgggctgtccaagcatgttgaagacgtccncgnntttcaggcccttggctcactcaatgacctccagttctttagatacaacagtaaagacaggaagtctcagcccatgggactctggagacaggtggaaggaatggaggattggaagcaggacagccaacttcagaaggccagggaggacatctttatggagaccctgaaagacattgtggagtattacaacgacagtaacgggtctcacgtattgcagggaaggtttggtttgtgagatcgagaataaca

SEQ ID NO: 658 - DNA, 404 bp, Homo sapiens
gcaagacgccacttcccctatcatagaagagcttatcacctttcatgatcacgccctcataatcattttccttatctgcttcctagtcctgtatgcccttttcctaacactcacaacaaaactaactaatactaacatctcagacgctcaggaaatagaaaccgttgaactatcctgcccgccatcatcctagtcctcatcgccctcccatccctacgcatcctttacataacagacgaggtcaacgatccctcccttaccatcaaatcaattggccaccaatggtactgaacctacgagtacaccgactacggcggactaatcttcaactcctacatacttcccccattattcctagaaccaaggcggacctgcgactccttgacgttgacaatcgagtagta

SEQ ID NO: 659 - DNA, 411 bp, Homo sapiens
ggcacgagggtcgccgttactccgaggagataccagtcggtagaggagaagtcgaggttagagggaactgggaggcactttgctgtctgcaatcgaagttgagggtgcaaaaatgcagagtaataaaacttttaacttggagaagcaaaaccatctccaagaaaagcatcatcaacatcaccaccagcagcagcaccaccagcagcaacagcagcagccgccaccaccgccaatacctgcaaatgggcaacaggccagcagccaaaatgaaggcttgactattgacctgaagaattttagaaaaccaggagagaagaccttcacccaacgaagccgtctttttgtgggaaatcttcctcccgacatcactgaggaagaaatgaggaaactatttgagaaatatggaaaggc

SEQ ID NO: 660 - DNA, 412 bp, Homo sapiens
ggcacgagggggatttgggtcgcagttcttgtttgtggatcgctgtgatcgtcacttaacaatgcagatcttcgtgaagactctgactggtaagaccatcaccctcgaggttgagcccagtgacaccatcgagaatgtcaaggcaaagatccaagataaggaaggcatccctcctgaccagcagaggctgatctttgctggaaaacagctggaagatgggcgcaccctgtctgactacaacatccagaaagagtccaccctgcacctggtgctccgtctcagaggtgggatgcaaatcttcgtgaagacactcactggcaagaccatcacccttgaggtcgagcccagtgacaccatcgagaacgtcaaagcaaagatccaggacaaggaaggcattcctcctgaccagcag

SEQ ID NO: 661 - DNA, 411 bp, Homo sapiens
ggcacgaggggagatcgatgatcttgccagtaatgtagagacagtgtctaaggccaagggaaacctcgagaagatgtgccgcaccctggaggaccaggtgagtgagctgaagtcaaaggaggaggaacagcagcgactgatcaacgacctgacaacccagagaggacgactgcagaccgaatccggtgaattttccaggcagcttgatgagaaggaagcgctggtatctcagttatcaaggggcaaacaggcattcactcaacagattgaggagctaaagaggcaacttgaagaggaagtaaaggccaagaacgcgctggcccacgccctgcagtcctcccgccatgactgtgacctgctgcgggaacagtacgaggaggagcaggagtctaaggctgaactgcagagggc

SEQ ID NO: 662 - DNA, 414 bp, Homo sapiens
ggcacgaggctcacaggaccagccactagcgcagcctcgagcgatggcctatgtccccgcaccgggctaccagcccacctacaacccgacgctgccttactaccagcccatcccgggcgggctcaacgtgggaatgtctgtttacatccaaggagtggccagcgagcacatgaagcggttcttcgtgaactttgtggttgggcaggatccgggctcagacgtcgccttccacttcaatccgcggtttgacggctgggacaaggtggtcttcaacacgttgcagggcgggaagtggggcagcgaggagaggaagaggagcatgcccttcaaaaagggtgccgcctttgagctggtcttcatagtcctggctgagcactacaaggtggtggtaaatggaaatcccttctatgagta

SEQ ID NO: 663 - DNA, 414 bp, Homo sapiens
  misc_feature 140, 167, 214, 320, 339, 391, 406: n = A,T,C or G
gcggcgctccttcctcctcggctcgcgtctcactcagtgtaccttctagtcccgccatggccgctctcacccgggacccccagttccagaagctgcagcaatggtaccgcgagcaccgctccgagctgaacctgcgccgnctcttcgatgccaacaaggaccgcttnaaccacttcagcttgaccctcaacaccaaccatgggcatatcctggnggattactccaagaacctggtgacggaggacgtgatgcggatgctggtggacttggccaagtccaggggcgtggaggccgaccgggagcggatgttcaatggtganaagatcaactacacccganggtcgagccgtgctgcacgtggctctgcggaaccggttcaaacacacccatnctgggagacggcaangatgtgat

SEQ ID NO: 664 - DNA, 411 bp, Homo sapiens
ggcacgaggcttagatgccgtgccatgctccacaaccatcaacaggaaccgcatgggccgagacaagaagagaaccttccccctttgctttgatgaccatgacccagctgtgatccatgagaacgcatctcagcccgaggtgctggtccccatccgctggacatggagatcgatgggcagaagctgcgagacgccttcacctggaacatgaatgagaagttgatgacgcctgagatgttttcagaaatcctctgtgacgatctggatttgaacccgctgacgtttgtgccagccatcgcctctgccatcagacagcagatcgagtcctaccccacggacagcatcctggaggaccagtcagaccagcgcgtcatcatcaagctgaacatccatgtgggaaacatttccctg

SEQ ID NO: 665 - DNA, 409 bp, Homo sapiens
ggcacgagggcgaatcgcagcttctgagaccagggttgctccgtccgtgctccgcctcgccatgacttcctacagctatcgccagtcgtcggccacgtcgtccttcggaggcctgggcggcggctccgtgcgttttgggccgggggtcgcttttcgcgcgcccagcattcacgggggctccggcggccgcggcgtatccgtgtcctccgcccgctttgtgtcctcgtcctcctcggggggctacggcggcggctacggcggcgtcctgaccgcgtccgacgggctgctggcgggcaacgagaagctaaccatgcagaacctcaacgaccgcctggcctcctacctggacaaggtgcgcgccctggaggcggccaacggcgagctagaggtgaagatccgcgactggtac

SEQ ID NO: 666 - DNA, 411 bp, Homo sapiens
ggcacgaggtgagctgaaccaagaaggaggagggggtcgggcctccgaggaaggcctagctgctgctgctgccaggaattccaggttggaggggcggcaacctcctgccagccttcaggccactctcctgtgcctgccagaagagacagagcttgaggagagcttgaggagagcaggaaagcagcctcccccgttgcccctctggatccactgcttaaatacggacgaggacagggccctgtctcctcagcttcaggcaccaccactgacctgggacagtgaatcgacaatgccgtcttctgtctcgtggggcatcctcctgctggcaggcctgtgctgcctggtccctgtctccctggctgaggatccccagggagatgctgcccagaagacagatacatcccaccatga

SEQ ID NO: 667 - DNA, 412 bp, Homo sapiens
ggcacgaggattatccagaaccttgagaaagacagacaaaaattggtcagcagccaggagcaagacagagaacagttaattcagaagcttaattgtgaaaaagatgaagctattcagactgccctaaaagaatttaaattggagagagaagttgttgagaaagagttattagaaaaagttaaacatcttgagaatcaaatagcaaaaagtcctgccattgactctaccagaggagattcttcaagcttagttgctgaacttcaagaaaagcttcaggaagaaaaagctaagtttctagaacaacttgaagagcaagaaaaaagaaagaatgaagaaatgcaaaatgttcgaacatctttgattgcggaacaacagaccaattttaacactgttttaacaagagagaaaatga

SEQ ID NO: 668 - DNA, 411 bp, Homo sapiens
  misc_feature 14, 26, 28, 29, 34, 59, 66, 71, 85, 86, 87, 88, 100, 124,128, 129, 130, 138, 145, 154, 155, 157, 160, 162, 173, 179,186, 189, 190, 191, 198, 199, 200, 201, 206, 218, 219, 221,223, 230, 244, 252, 258, 259, 275, 282, 289, 298, 300: n = A,T,C or G
  misc_feature 301, 303, 308, 309, 313, 316, 317, 318, 320, 323, 324, 334,349, 350, 353, 355, 359, 363, 364, 368, 373, 381, 382, 383,399, 402, 403, 406, 407: n = A,T,C or G
ggcacgagggtctngggcgcgctcanannagatnatcaacctgcgagaggtcagcaccngcttccncctgncacccggggagtannnnttaattgtgaanaagatgaaagctattcagacttgncctnnnataatttnaattggngaggagaanntnttntnatcaaaagttnttttanaaaaagntannncatcttnnnntaatnaaagtattacannantnactgccnattgactttaccanaagagaangcttcnnggctttgttgctgaancttaatnaaaaggntatggggantnnanaaaanntaanttnnntnganntaatctttgnttgcagcttatcatnnttngntatnaaannaganaatanttctaatnnntgttttcgaatctatnatnnctnntttt

SEQ ID NO: 669 - DNA, 412 bp, Homo sapiens
ggcacgagggcagagaaaccagattctctctcagcagttacagcagatggaagctgagcataatactttgaggaacactgtggaaacagaaagagaggagtccaagattctactggaaaagatggaacttgaagtggcagagagaaaattatccttccataatctgcaggaagaaatgcatcatcttttagaacagtttgagcaagcaggccaagcccaggctgaactagagtctcggtatagtgctttggagcagaagcacaaagcagaaatggaagagaagacctctcatattttgagtcttcaaaagactggacaagagctgcagtctgcctgtgatgctctaaaggatcaaaattcaaagcttctccaagataagaatgaacaggcagttcagtcagcccagaccatt

SEQ ID NO: 670 - DNA, 411 bp, Homo sapiens
  misc_feature 154, 352, 373: n = A,T,C or G
ggcacgaggagagggacttccagagaagctggttataaaaaaccagcaatttcacaaggaacgagagcagccacccagatttgcacagcctggctcctttgagtatgaatatgccatgcgctggaaggcactcattgagatggagaagcagcancaggaccaagtggaccgcaacatcaaggaggctcgtgagaagctggagatggagatggaagctgcacgccatgagcaccaggtcatgctaatgagacaggatttgatgaggcgccaagaagaacttcggaggatggaagagctgcacaaccaagaggtgcaaaaacgaaagcaactggagctcaggcaggaggaagancgcaggcgccgtgaagaaganatgcggcggcagcaagaagaaatgatgcggcgacagca

SEQ ID NO: 671 - DNA, 411 bp, Homo sapiens
  misc_feature 160: n = A,T,C or G
ggcacgagggcaacatccagcctcctgacaaggtgatccgggcgggccccgcaggaattttatcccctcaccggcctcacactagtatcgcatgtccactatccagaacctccaatctttcgacccctttgctgatgcaactaagggtgacgacttactnccggcagggactgaggattacattcatataagaatccagcaacggaacggcagaaagacactgactactgttcagggcattgcagatgattatgacaaaaagaaacttgtgaaagctttcaaaaagaaatttgcctgtaatggtactgtgattgaacatcctgaatacggagaggttattcagcttcaaggtgaccaaagaaaaaacatctgccagtttctcttggaggttggcattgtaaaggaggaaca

SEQ ID NO: 672 - DNA, 409 bp, Homo sapiens
ggcacgaggcccactccaccttactaccagacaaccttagccaaaccatttacccaaataaagtataggcgatagaaattgaaacctggcgcaatagatatagtaccgcaagggaaagatgaaaaattataaccaagcataatatagcaaggactaacccctataccttctgcataatgaattaactagaaataactttgcaaggagagccaaagctaagacccccgaaaccagacgagctacctaagaacagctaaaagagcacacccgtctatgtagcaaaatagtgggaagatttataggtagaggcgacaaacctaccgagcctggtgatagctggttgtccaagatagaatcttagttcaactttaaatttgcccacagaaccctctaaatccccttgtaaatt

SEQ ID NO: 673 - DNA, 412 bp, Homo sapiens
  misc_feature 16, 26, 30, 44: n = A,T,C or G
ggcacgaggggaaaanctgggccccntctncacagccgaccaanggcagcgggctctgcccggcgccgctttctgcgacctggccgtcagccccacgtcgccggcctggaggggcaaagaggacgagggggccgcggcttcctccggggaccttggcttgcctggattgccaggagctggaagttgacattgagtctaggctgaggatggaaggtgtggagctgaaggaagaatggcaggatgaagattttccaatacctttaccagaagatgacagcattgaagcagatacactagatggaactgatccagacagacagcctggctccttagaagttaatgggaacaaagtaaggaagaaactgatggccccagacatcagcctgaccctggatcctggtgaagactctct

SEQ ID NO: 674 - DNA, 413 bp, Homo sapiens
  misc_feature 391: n = A,T,C or G
gcacagcctcacttctaaccttctggaacccacccaccactgccaagctcactattgaatccacgccgttcaatgtcgcagaggggaaggaggttcttctactcgcccacaacctgccccagaatcgtattggttacagctggtacaaaggcgaaagagtggatggcaacagtctaattgtaggatatgtaataggaactcaacaagctaccccagggcccgcatacagtggtcgagagacaatataccccaatgcatccctgctgatccagaacgtcacccagaatgacacaggattctataccctacaagtcataaagtcagatcttgtgaatgaagaagcaaccggacagttccatgtatacccggagctgcccaagccctccatctncagcaacaactccaaccccgtg

SEQ ID NO: 675 - DNA, 411 bp, Homo sapiens
  misc_feature 167, 183, 316, 381: n = A,T,C or G
ggcacgaggtattgttgctccagacacagtgatccactgtgagggggagccaatcaagcgagaggatgaggaggaatccttgaatgaagtaggctatgatgacatcggtggttgcaggaagcagctagctcaaataaaggagatggtggagctgccactgagacatnctgcgctctttaaggngattggtgtaaagcctcctcggggaatcttgttgtatgggccttctgggacagggaagaccctgattgctcgagctgtggcaaatgaaactggagccttcttctttctgatcaatggtcctgaaatcattgancaaattggctggtgagtctgagagcaaccttcgtaaagcctttgaggaagctgaaaagaatgctnctgctatcatcttcatcgatgaacttgatg

SEQ ID NO: 676 - DNA, 413 bp, Homo sapiens
  misc_feature 56, 143, 173, 210, 267, 270, 350, 378, 389: n = A,T,C or G
ggcacgaggcgggagcggcgcaggcggccgagcgggactggctgggtcggctgggntgctggtgcgaggagccgcggggctgtgctcggcggccaaggggacagcgcgtgggtggccgaggatgctgcggggcggtagctccngcgcccctccttggtgactgcttgcgccgngcctcacacagccgaaggcgggctcggcgcacagtcngctgctccgcgctcgcgcccggcggcgctccaggtgctgacagcgcgagagagcgcnggncctcaggagcaaggcgaatgtatgacaacatgtccacaatggtgtacataaaggaagacaagttggagaagcttacacangatgaaattattttctaagacaaaagcnagtaaattcanggggcctgggaaagctttgaagaa

SEQ ID NO: 677 - DNA, 410 bp, Homo sapiens
ggcacgagggccaagtcagcttcttctgagagagtctctagaagacatgatgctacactcagctttgggtctctgcctcttactcgtcacagtttcttccaaccttgccattgcaataaaaaaggaaaagaggcctcctcagacactctcaagaggatgggggagatgacatcacttgggtacaaacttatgaagaaggtctcttttatgctcaaaaaagtaagaagccattaatggttattcatcacctggaggattgtcaatactctcaagcactaaagaaagtatttgcccaaaatgaagaaatacaagaaatggctcagaataagttcatcatgctaaaccttatgcatgaaaccactgataagaatttatcacctgatgggcaatatgtgcctagaatcatgttt

SEQ ID NO: 678 - DNA, 410 bp, Homo sapiens
ggcacgaggaattaatgaagtctttaatgaacttatattagatgtgttaaagcagggttacatgatgaaaaagggccacagacggaaaaactggactgaaagatggtttgtactaaaacccaacataatttcttactatgtgagtgaggatctgaaaggataagaaaggagacattctcttggatgaaaattgctgtgtagagtccttgcctgacaaagatggaaagaaatgcctttttctcgtaaaatgttttgataagacttttgaaatcagtgcttcagataagaagaagaaacaggagtggattcaagccattcattctactattcatctgttgaagctgggcagccctccaccacacaaagaagcccgccagcgtcggaaagaactccggaagaagcagctggct

SEQ ID NO: 679 - DNA, 410 bp, Homo sapiens
  misc_feature 353: n = A,T,C or G
ggcacgagggagagagaatagttcgagtttttttttttttttattgcaagcatatttcttttaatgactccagtaaaattaagcatcaagtaaacaagtggaaagtgacctacacttttaacttgtctcactagtgcctaaatgtagtaaaggctgcttaagttttgtatgtagttggattttttggagtccgaaggtatccatctgcagaaattgatgcccaaattgaatttggattcaagtggattctaaatactttgcttatcttgaagagagaagcttcataaggaataaacaagttgaatagagaaaacactgattgataataggcattttagtgggctttttaatgntttctgctgtgaaacatttcaagatttattgatttttttttttcactttccccatca

SEQ ID NO: 680 - DNA, 410 bp, Homo sapiens
ggcacgaggcaattctggaaacaatgggaacaatggaaaagagagagaggactcctggaaaggagcttctgttcagaaatcaactgggtcaaaaaatgactcttgggacaacaataacaggtctacgggtgggtcctggaactttggcccccaggactctaatgacaacaaatggggtgaagggaacaaaatgacatctggggtctctcagggagaatggaaacagccgactgggtctgatgagttgaaaattggagaatggagtggtccaaaccaaccaaattctagcactggagcatgggacaatcaaaagggccaccccctccctgaaaaccaaggcaatgcccaggctccctgttggggaagatcttccagctccacaggaagtgaagttggaggtcaaagcactg

SEQ ID NO: 681 - DNA, 402 bp, Homo sapiens
gccggagcctaccctgccactggcccctatggcgcccctgctgggccactgattgtgccttataacctgcctttgcctgggggagtggtgcctcgcatgctgataacaattctgggcacggtgaagcccaatgcaaacagaattgctttagatttccaaagagggaatgatgttgccttccactttaacccacgcttcaatgagaacaacaggagagtcattgtttgcaatacaaagctggataataactggggaagggaagaaagacagtcggttttcccatttgaaagtgggaaaccattcaaaatacatgtactggttgaacctgaccacttcaaggttgcagtgaatgatgctcacttgttgcagtacaatcatcgggttaaaaaactcaatgaaatc

SEQ ID NO: 682 - DNA, 401 bp, Homo sapiens
gggcgagcggagttagcagggctttactgcagagcgcgccgggcactccagcgaccgtggggatcagcgtaggtgagctgtggccttttgcgaggtgctgcagccatagctacgtgcgttcgctacgaggattgagcgtctccacccatcttcttgtgcttcaccatctacataatgaatcccagtatgaagcagaaacaagaagaaatcaaagagaatataaagaatagttctgtcccaagaagaactctgaagatgattcagccttctgcatctggatctcttgttggaagagaaaatgagctgtccgcaggcttgtccaaaaggaaacatcggaatgaccacttaacatctacaacttccagccctggggttattgtcccagaatctagtgaaaataa

SEQ ID NO: 683 - DNA, 3255 bp, Homo sapiens
accgttgcggccgcaggggtctgggcagggctgggcagtgctgccggagcaaaagcggtagcgggagcccggccggagctgggtctggagacgccgtggcagcctgaacggagtgtgcgacggattgggaggtttgtctacagattttgagcgttcgaagttgacccctgactaagtatactttgctgctccctcagcctttgaaaaaatgtctgtcacatatgatgattccgttggagtagaagtgtccagcgacagcttctgggaggtcgggaactacaagcggactgtgaagcggatcgacgatggccaccgcctgtgcagcgacctcatgaactgcctgcatgagcgggcgcgcatcgagaaggcgtatgcgcagcagctcactgagtgggcccggcgctggaggcagcttgtggagaaagggccccagtacgggaccgtggagaaggcctggatggccttcatgtccgaggcagagagggtgagcgagctgcacctcgaggtgaaggcctcactgatgaacgatgacttcgagaagatcaagaactggcagaaggaagcctttcacaagcagatgatgggcggcttcaaggagaccaaggaagctgaggacggctttcggaaggcacagaagccctgggccaagaagctgaaagaggtagaagcagcaaagaaagcccaccatgcagcgtgcaaagaggagaagctggctatctcacgagaagccaacagcaaggcagacccatccttcaaccctgaacagctcaagaaattgcaagacaaaatagaaaagtgcaagcaagatgttcttaagaccaaagagaagtatgagaagtccctcaaggaactcgaccagggcacaccccagtacatggagaacatggagcaggtgtttgagcagtgccagcagttcgaggagaaacgccttcgcttcttccgggaggttctgctggaggttcagaagcacctaaacctgtccaatgtggctggttacaaagccatttaccatgacctggagcagagcatcagagcagctgatgcagtggaggacctgaggtggttccgagccaatcacgggccaggcatggccatgaactggccgcagtttgaggagtggtccgcagacctgattcgaaccctcagccggagagagaagaagaaggccactgacggcttcaccctgacgggcatcaaccagacaggcgaccagtttttgccgagtaagcccagcagcacccttaatgtcccgagcaaccccgcccagtctgcgcagtcacagtccagctacaaccccttcgaggatgaggacgacacgggcagcaccgtcagtgagaaggaggacattaaggccaaaaatgtgagcagctacgagaagacccagagctatcccaccgactggtcagacgatgagtctaacaaccccttctcctccacggatgccaatggggactcgaatccattcgacgacgacgccacctcggggacggaagtgcgagtccgggccctgtatgactatgaggggcaggagcatgatgagctgagcttcaaggctggggatgagctgaccaagatggaggacgaggatgagcagggctggtgcaagggacgcttggacaacgggcaagttggcctatacccggcaaattatgtggaggcgatccagtgatgagtcggggacaggccagcggggggacggaggcggcgggcccaggagcctcagccagccacgtgggcatccactccttttcctgcaagagatgatggttccattgctcttggcttcatggtgttcctggaaggcagatgagctggtcatttcgcctgggactcggcacctttccgagtgcagctggagggatctgagcgcaggaagacgcagaacaacagaaatagccgcccctccccgcccactgtgcctgttggcctatcatagatctctatgttcttgactttgtctctcctttccgagtcaatggtgggttacactgatcttgttccactgattactctctctgacgagtccatcacctgcaacttaaatgaacaagcttacatcccattttgagtgaagattttgaggtttttaatttaaaggctgtgtacagttatacttttttatacacctgttcatttctacttaaattatggcacagattgatgcgcaccagtcttgaggaaacgatctccctattcccttaccctgttactcagccacgccgtgtgtaggcttagcctcaggtggcagatgtttgaggaaaggaattatgccaggaaggtgggaccgggttatggtcgggtttctattgggaatgctctttgtgcttttgggcatctgaatggaagctttacatagaaccttaggtagaactcccccaaatcgccatatttaaaaattattttcactctattcttgcttaaaactgtactcttttgcaaattaacaattttatcactgattcagagttaaaaagaagactaacttttcaagcaaatgcatctgtaaagatgctttagattagactgtcatgtctcagtgtctatctgtatatattatttgatattcagagaatctaaagcactcgtctactgttttaatgagatttaacagcttttaacagtgagtttcgtttgtaaactgcttgaagtctgtggcattcaggcacacgtctggctggccggctgggtctcctcccgggctcagtgggcctggggcctctctgacgtggtgcctgctggagggaggctcgtcgtcaccagctgactgctggtccggcttctgaccggcctttgtcctggctccgtagcagaacactgtaaaagtgcccgcgtctttgcagtagttgcagatttcagtcgtcgtgttacttgtgcacaaacagaagctgggtcttacccgcagcacgagtgtctcgggctgcccggagtcgcccgggagcaggtgctgcagccagagttacgcgggggccacgcgggccggcgggggtggggggaacgtgggggaacctgtgtttcacgtgactcagcagtgcccgccgccgtcaccagctatgcattcactccgtttccagtgagcagatgtcttgcttggaaagtggacctgtgtctgtgtctgtcctgagaacttaccagcagaaatcctcatttctgtgctacggatttaccaaaaattgtcaagtctttttcagtttaacagttcctttacatgtgtagtatttgaggaaaaaaatcaataaacagttgatctcgtgcata

SEQ ID NO: 684 - DNA, 2993 bp, Mus musculus
ctggagtgtctgctgccaccccctcgtcctctgcagaaatgtctgtcacctacgatgactctgtgggagtggaagtgtccagcgacagcttctgggaggttgggaactacaaacggactgtgaagcggattgacgatggccaccgcctgtgtggtgacctcatgaactgtctgcatgagcgggcacgcatcgagaaggcgtatgcacagcagctcactgagtgggcccgacgctggaggcagctggtagagaagggaccacagtatgggaccgtggagaaggcctggatagctgtcatgtctgaagcagagagggtgagtgaactgcacctggaagtgaaggcatcactgatgaatgaagactttgagaagatcaagaactggcagaaggaagcctttcacaagcagatgatgggaggcttcaaggagaccaaagaagcagaggatggctttcggaaggcccagaagccctgggccaagaagctgaaagaggtggaagcggcaaagaaggcgcaccacacagcgtgcaaagaggagaagctggccatctcccgggaagccaacagcaaggcagatccatccctcaaccctgagcagctgaagaaactgcaagacaagatagaaaaatgcaaacaggacgttctaaagaccaaggacaagtatgagaagtccctgaaggagcttgatcagaccacaccccagtacatggagaacatggagcaggtgttcgagcagtgccagcagtttgaagagaagcgcctgcgcttcttccgggaggttctgctggaggttcagaagcacttggatctgtccaatgtggctagctataaaaccatttaccgggagctggagcagagcatcaaagcagcagatgcggtagaggacctgaggtggttccgggctaaccatgggccaggcatggctatgaactggccacagtttgaggagtggtctgcagatctgaatcgaactctcagccggagagagaagaagaaggctgttgacggtgtcaccctaacagggatcaaccagacaggtgaccagtctggacagaacaagcctggcagcaaccttagtgtcccgagcaaccccgcccagtccacgcagttacagtccagctacaaccccttcgaggacgaggacgacacgggcagcagcatcagtgagaaggaggacattaaggccaaaaatgtcagcagctatgagaagactcagacttaccccactgactggtctgatgatgagtctaacaaccctttctcctccacggatgccaacggggattcgaacccatttgatgaggacacgacctcaggaacagaagtgcgagttcgggccctctatgactatgaggggcaggaacatgatgagctgagcttcaaggctggggatgaactgaccaagatagaggatgaagatgaacagggttggtgcaagggacgtttagacagcggccaggttggcctatacccagccaactatgtcgaggctatccagtgacagcccatgggcaggctggcggagagacggaaatgggcagttcaggagctccgttagccttggcctgggcagtgacacctctagtgcccccagcagccatgtaggcatccactccacctgcaaaagacgatggctctgttgttcttggcttcctggtgtgctttgaaggcagatgagctggtgatttcattgggcacttggcccttttccaagcacatctgggcagatatagacacaggaagatagggtccaacagcgagagccaggcccctccccacccccaccagctctctctatcatggatctgcaccttctcgcccttgtctctcctgagtcatgacgggtcatactgattcttgttccactgatgattttctctgatgaggtcctatctgcaaggtcaatgagcagacttacatgccatcttctgagtaaagagtttgaggttttaatttaaaggcaatgtacagctatacttttttatatgctcttccagtcagttaaattatggcctacactgatctgagatgttctccacgtgagctgtcttcatttctctgtgctatgtccagatgtggggttgctgcagccggggttctatggcaagtgccagttgcagggctaaccttgtgcaacgttccccaacacttccacatacagaaattattttcactctatccctgcttcagtttttgcagattaacagttctattagtgatttggaaagttaacagtaagaagactaacttttcaaaacagttgcatctgtagattaagatgcttttacattagaccggttgtgtctcgatgtatatctgtatatattatttgataatcagaaaatctatagagttcacccactgttgaatgagagctggtggcttctgacagcagatctggtcaactgcttgaagcccatggcattgaagcacaggcacggctggttaacggtgcccacccagttaggatgtggctctggcctctgagtggagctgctgggaagactgattctcattggcctgggctccaagctcatgaccgagcactggaaaagctcctaggacttggtagtaatcgtagacttcacagtccctgtgtcactcactggagagctagagggaggggttcgacaccctccaccacacacacacacacacacacacacacacacacaagttcctccagttgcccttgtcctcaggtgcagtgggactgttgtgagccccagggatgggcacaaagaggacttttattttgttagctcggacagtgcagtggtgcacatcagcaacttgtatttcttcggtgtttggcacgagcactgtctcgctgtggctgtgtgtcatgagaacttaccagcagaaatccttgttcctaagctacagaatgaccaaaagctgtcaagtccttaatgtttagaaactccttaaaatgtatagtattttagaacaacaacaacaaaactcaataaacagttgatcttgtgtgtttgac

SEQ ID NO: 685 - protein, 486 aa, Homo sapiens
MSVTYDDSVGVEVSSDSFWEVGNYKRTVKRIDDGHRLCSDLMNCLHERARIEKAYAQQLTEWARRWRQLVEKGPQYGTVEKAWMAFMSEAERVSELHLEVKASLMNDDFEKIKNWQKEAFHKQMMGGFKETKEAEDGFRKAQKPWAKKLKEVEAAKKAHHAACKEEKLAISREANSKADPSFNPEQLKKLQDKIEKCKQDVLKTKEKYEKSLKELDQGTPQYMENMEQVFEQCQQFEEKRLRFFREVLLEVQKHLNLSNVAGYKAIYHDLEQSIRAADAVEDLRWFRANHGPGMAMNWPQFEEWSADLIRTLSRREKKKATDGFTLTGINQTGDQFLPSKPSSTLNVPSNPAQSAQSQSSYNPFEDEDDTGSTVSEKEDIKAKNVSSYEKTQSYPTDWSDDESNNPFSSTDANGDSNPFDDDATSGTEVRVRALYDYEGQEHDELSFKAGDELTKMEDEDEQGWCKGRLDNGQVGLYPANYVEAIQ

SEQ ID NO: 686 - DNA, 1571 bp, Homo sapiens
tgttaggttttattttaagtagaaataagtgtttgcatataggaaagttagttttcacttgtgttgattcttctgtttttaggatgccattggaggagaatctatgcctattccaactattgatacatcacgcaaaaagagactacccagtaaagaactaccagattcatcatctccagttccagcaaacaacatccgtgtcatcaaaaattccattcgactgacccttaatcggtaaaagcagtgcctcctcacttaagtgaacaagcaatcatttagtggcatagatgcagccacttgttttttaaatagaagtggctgtcatacgtgaaataaggtgaaagtgacagccttcagtctaataaccttgaagtggtttttgaactgtcaaactttgacctgtagatgctgtagcattctctcactgattgctacatacacttctctgaggatcacctgctgtcaaattgccatctacagtattacagctttgcatttgggggttttactgccttaactttcaatgcttgttatgggaaccagttcttagccacttggacactgataacaagtcctgaactccttttttttttttttttttgtgtttttctttttttgtcttatgttgtaatcattgtatagagctaaaaaaattgaaaacaaacaaaaaaattgtcttgtattttccaaatgttaatacatttactttagcattgaagccactttgaaacctgagataaatgaatgtgaggtatcttttctgctttcctcatttgtgtagatgtactgtctgttctgttgatttaaattatttttttccagattggcacatgaaatatttaaacttttttgtgtgcctttctgtccaaatgttgcatagttaccagggaagattagtccagtgattacataagagttgggcaccataaattctctatattttgcctcccatggaggcctttgaaatgcatctttattaaaaatcaaaatataaccaggatactgaaagtcagtatatgaatggtaaaattgttacatatcctatttcatgccattcttgttagttgactggtattttttactgaggagcaactcattccagcatcaacaataagataacctttaagtatggcacacttgtatttttgaggtgtaaaattaacttggcatgataattcctgatcattatttaccccacaacttcaaatagtttcttcacggactaggcatgcagaaataagcagtggattttattgaaacctaaaggcattttgaatgacattgttaccaaccattaattggctcaggacctttgtaatttttatttaactatatgagttgtctttttttacgctgcttttttcaatgcatttcttaatattttttaagtttcatgaatgcatgctcagtttattaaaatccataaccatgtaattcttgtaatatgttgattcagtgttttgtaaatgaagtcgtatgtattttcagagtatttttgtatgtactgtaagataccatcttttcaaagagaaacgtttaaaacctttaaaaaaaaaaaaaaaaaaaaaaaa

SEQ ID NO: 687 - protein, 73 aa, Homo sapiens
LGFILSRNKCLHIGKLVFTCVDSSVFRMPLEENLCLFQLLIHHAKRDYPVKNYQIHHLQFQQTTSVSSKIPFD

SEQ ID NO: 688 - DNA, 21 bp, Artificial Sequence
  PCR primer
cacgacgttgtaaaacgacgg

SEQ ID NO: 689 - DNA, 20 bp, Artificial Sequence
  PCR primer
cacaggaaacagctatgacc

SEQ ID NO: 690 - DNA, 5160 bp, Homo sapiens
atggtgccccctggtgtctacatgagaaatgccagctgtcatttccggaaggtcctgaacaagggttttcaaagctcccaagctctcagggtctgcaacaactactggattcgggagaaccccaatctgaacagtacccaggaggtgaatgagctgctgctgggaatggcctcccagatttcggagttggaggacaacatagtggttgaagatctgagggattactggcctggccctggcaaattctcccgtacagactatgtggccagcagcatccaacgtggccgagatatggggctgcccagctatagccaggccctgctggcctttgggctggacatcccaaggaactggagtgatctcaaccctaatgtggacccccaggtgctggaggccacagctgccctgtacaaccaggacctatcccagctagagctgctccttggcgggctcctggagagccatggggaccctggacccctgttcagtgccattgtcctcgaccagtttgtacggctgcgggatggtgaccgctactggtttgagaacaccaggaatgggctgttctccaagaaggagattgaagacatccgaaataccaccctgcgggacgtgctggtcgctgttatcaacattgaccccagtgccctgcagcccaatgtctttgtctggcataaaggtgcaccctgccctcaacctaagcagctcacaactgacggcctgccccagtgtgcacccctgactgtgcttgacttctttgaaggcagcagccctggttttgccatcaccatcattgctctctgctgccttcccttagtgagtctgcttctctctggagtggtggcctatttccggggccgagaacacaagaagctacaaaagaaactcaaagagagcgtgaagaaggaagcagccaaagatggagtgccagcgatggagtggccaggccccaaggagaggagcagtcccatcatcatccagctgctgtcagacaggtgtctgcaggtcctgaacaggcatctcactgtgctccgtgtggtccagctgcagcctctgcagcaggtcaacctcatcctgtccaacaaccgaggatgccgcaccctgctgctcaagatccctaaggagtatgacctggtgctgctgtttagttctgaagaggaacggggcgcctttgtgcagcagctatgggacttctgcgtgcgctgggctctgggcctccatgtggctgagatgagcgagaaggagctatttaggaaggctgtgacaaagcagcagcgggaacgcatcctggagatcttcttcagacacctttttgctcaggtgctggacatcaaccaggccgacgcagggaccctgcccctggactcctcccagaaggtgcgggaggccctgacctgcgagctgagcagggccgagtttgccgagtccctgggcctcaagccccaggacatgtttgtggagtccatgttctctctggctgacaaggatggcaatggctacctgtccttccgagagttcctggacatcctggtggtcttcatgaaaggctccccagaggataagtcccgtctaatgtttaccatgtatgacctggatgagaatggcttcctctccaaggacgaattcttcaccatgatgcgatccttcatcgagatctccaacaactgcctgtccaaggcccaactggccgaggtggtggagtctatgttccgggagtcgggattccaggacaaggaggagctgacatgggaggattttcacttcatgctgcgggaccatgacagcgagctccgcttcacgcagctctgtgtcaaaggtggaggtggaggtggaaatggtattagagatatctttaaacaaaacatcagctgtcgagtctcgttcatcactcggacacctggggagcgctcccacccccagggactggggccccctgccccagaagccccagagctgggaggccctggactgaagaagaggtttggcaaaaaggcagcagtgcccactccccggctgtacacagaggcgctgcaagagaagatgcagcgaggcttcctagcccaaaagctgcagcagtacaagcgcttcgtggagaactaccggaggcacatcgtgtgtgtggcaatcttctcggccatctgtgttggcgtgtttgcagatcgtgcttactactatggctttgccttgccaccctcggacattgcacagaccaccctcgtgggcatcatcctgtcacgaggcacggcggccagcgtctccttcatgttctcttatatcttgctcaccatgtgccgcaacctcataaccttcctgcgagagactttcctcaaccgctatgtgccttttgatgccgcagtggacttccaccgctggatcgccatggctgctgttgtcctggccattttgcacagtgctggccacgcagtcaatgtctacatcttctcagtcagcccactcagcctgctggcctgcatattccccaacgtctttgtgaatgatgggtccaagcttccccagaagttctattggtggttcttccagaccgtcccaggtatgacaggtgtgcttctgctcctggtcctggccatcatgtatgtcttcgcctcccaccacttccgccgccgcagcttccggggcttctggctgacccaccacctctacatcctgctctatgccctgctcatcatccatggcagctatgctctgatccagctgcccactttccacatctacttcctggtcccggcaatcatctatggaggtgacaagctggtgagcctgagccggaagaaggtggagatcagcgtggtgaaggcggagctgctgccctcaggagtgacctacctgcaattccagaggccccaaggctttgagtacaagtcaggacagtgggtgcggatcgcctgcctggctctggggaccaccgagtaccaccccttcacactgacctccgcgccccatgaggacacactcagcctgcacatccgggcagtggggccctggaccactcgcctcagggagatctactcatccccaaagggcaatggctgtgctggatacccaaagctgtaccttgatggaccgtttggagagggccatcaggagtggcataaatttgaggtgtcagtgttggtgggagggggcattggggtcaccccctttgcctccatcctcaaagacctggtcttcaagtcatccttgggcagccaaatgctgtgtaagaagatctacttcatctgggtgacacggacccagcgtcagtttgagtggctggctgacatcatccaagaggtggaggagaacgaccaccaggacctggtgtctgtgcacatttatgtcacccagctggctgagaagttcgacctcaggaccaccatgctatacatctgcgagcggcacttccagaaagtgctgaaccggagtctgttcacgggcctgcgctccatcacccactttggccgtccccccttcgagcccttcttcaactccctgcaggaggtccacccacaggtgcgcaagatcggggtgttcagctgcggccctccaggaatgaccaagaatgtagagaaggcctgtcagctcgtcaacaggcaggaccgagcccacttcatgcaccactatgagaacttctgagcctgtcctccctggctgctgcttccagtatcctgccttctcttctgtgcacctaagttgcccagccctgctggcaatctctccatcagaatccaccttaggcctcagctggagggctgcagagcccctcccaatattgggagaatattgacccagacaattatacaaatgagaaaaggcaggagactatgttctacaattgcagtgcatgatgattataagtccacctgtttatcaacggcaccattcctgcagccctccagacttcctgcccttagcaagtgcgcaaccagtcaggatctcccaaagaagataaagaccactcctcaccccagctcaagccatggcaggcgtggcaagcaaagtggggaggagacagtccctgcttgtgacaagtgtggaggtgaaaaggtacaatagtgcttgtctccgatagctccccacatctctaattgacttccacaaaatcgatgcgttgctttggtatttgcttggactgacatttgagggaggaggaggctgggatcctctggctgagaatctcctcagagcccagtgcagaagctgtgatgcttagaacctggacagcccgactgcctcaactctgtctccaggtctattccctccagctccaaaaggagcagccctacttctaccccttcccgtccccaaagtgtcagcaactttgaggagggcaccaggaaacaaagatgcctccccagccctgatattcttgatgtcaccagtgatacccactgccctgacccctgggcaggcccctctccgcatctactggagtggtccctgggctctggggctgaaggattccagcctctctgccagatattcagtactcgatctcaattcccctcttccacaagagttgggtgaccagctgtcctagtttgcccaggactctccctgttttagcactgaaagtctcttgccccaggaaaccccatcagtcccaggcagattgggacagctggtcaccttacgcaagagccaggctgaaacatcccctccatactcagctctttaacttttcttttcctttttcatcgggctctttcctaaaaagctgagctgtaaaatattttacatcgaggtataataaataatcatgtacatgttttaccaccacccaggtcaagacatagaatgtttcaacatttccatcaccccagaaactccccttgtacccccttccacttcgtctcccctagctcctagaagcaaccactgatgtgatttctaccaaatccagttttggtcctactaaatatactcttttgagactggcctcttttactcaccataatgcctttgtaattcatccatgctgttgtgtgtatcagcagtttgttccttttcattgctgagtagtattctattgtagagatgtaccacagtttgtttattcttctgttgatggacgtttgggttgtttctaattttgaatgattataaataaaaattctgtgagtgttcttgtacgtaaaaaaaaaaaaaaaaaaaaaaaaaaaa

SEQ ID NO: 691 - DNA, 2265 bp, Homo sapiens
atttgcctgtgtttagaagggtattactacaactcttctacatgtaagaaaggaaaggtattccctgggaagatttcagtgacagtatcagaaacatttgacccagaagagaaacattccatggcctatcaagacttgcatagtgaaattactagcttgtttaaagatgtatttggcacatctgtttatggacagactgtaattcttactgtaagcacatctctgtcaccaagatctgaaatgcgtgctgatgacaagtttgttaatgtaacaatagtaacaattttggcagaaaccacaagtgacaatgagaagactgtgactgagaaaattaataaagcaattagaagtagctcaagcaactttctaaactatgatttgacccttcggtgtgattattatggctgtaaccagactgcggatgactgcctcaatggtttagcatgcgattgcaaatctgacctgcaaaggcctaacccacagagccctttctgcgttgcttccagtctcaagtgtcctgatgcctgcaacgcacagcacaagcaatgcttaataaagaagagtggtggggcccctgagtgtgcgtgcgtgcccggctaccaggaagatgctaatgggaactgccaaaagtgtgcatttggctacagtggactcgactgtaaggacaaatttcagctgatcctcactattgtgggcaccatcgctggcattgtcattctcagcatgataattgcattgattgtcacagcaagatcaaataacaaaacgaagcatattgaagaagagaacttgattgacgaagactttcaaaatctaaaactgcggtcgacaggcttcaccaatcttggagcagaagggagcgtctttcctaaggtcaggataacggcctccagagacagccagatgcaaaatccctattcaagacacagcagcatgccccgccctgactattagaatcataagaatgtggaacccgccatggcccccaaccaatgtacaagctattatttagagtgtttagaaagactgatggagaagtgagcaccagtaaagatctggcctccggggtttttcttccatctgacatctgccagcctctctgaatggaagttgtgaatgtttgcaacgaatccagctcacttgctaaataagaatctatgacattaaatgtagtagatgctattagcgcttgtcagagaggtggttttcttcaatcagtacaaagtactgagacaatggttagggttgttttcttaattcttttcctggtagggcaacaagaaccatttccaatctagaggaaagctccccagcattgcttgctcctgggcaaacattgctcttgagttaagtgacctaattcccctgggagacatacgcatcaactgtggaggtccgaggggatgagaagggatacccaccatctttcaagggtcacaagctcactctctgacaagtcagaatagggacactgcttctatccctccaatggagagattctggcaacctttgaacagcccagagcttgcaacctagcctcacccaagaagactggaaagagacatatctctcagctttttcaggaggcgtgcctgggaatccaggaactttttgatgctaattagaaggcctggactaaaaatgtccactatggggtgcactctacagtttttgaaatgctaggaggcagaaggggcagagagtaaaaaacatgacctggtagaaggaagagaggcaaaggaaactgggtggggaggatcaattagagaggaggcacctgggatccaccttcttccttaggtcccctcctccatcagcaaaggagcacttctctaatcatgccctcccgaagactggctgggagaaggtttaaaaacaaaaaatccaggagtaagagccttaggtcagtttgaaattggagacaaactgtctggcaaagggtgcgagagggagcttgtgctcaggagtccagccgtccagcctcggggtgtaggtttctgaggtgtgccattggggcctcagccttctctggtgacagaggctcagctgtggccaccaacacacaaccacacacacacaaccacacacacaaatgggggcaaccacatccagtacaagcttttacaaatgttattagtgtccttttttatttctaatgccttgtcctcttaaaagttattttatttgttattattatttgttcttgactgttaattgtgaatggtaatgcaataaagtgcctttgttaaaaaaaaaaaaaaaaaa

SEQ ID NO: 692 - protein, 1210 aa, Homo sapiens
MVPPGVYMRNASCHFRKVLNKGFQSSQALRVCNNYWIRENPNLNSTQEVNELLLGMASQISELEDNIVVEDLRDYWPGPGKFSRTDYVASSIQRGRDMGLPSYSQALLAFGLDIPRNWSDLNPNVDPQVLEATAALYNQDLSQLELLLGGLLESHGDPGPLFSAIVLDQFVRLRDGDRYWFENTRNGLFSKKEIEDIRNTTLRDVLVAVINIDPSALQPNVFVWHKGAPCPQPKQLTTDGLPQCAPLTVLDFFEGSSPGFAITIIALCCLPLVSLLLSGVVAYFRGREHKKLQKKLKESVKKEAAKDGVPAMEWPGPKERSSPIIIQLLSDRCLQVLNRHLTVLRVVQLQPLQQVNLILSNNRGCRTLLLKIPKEYDLVLLFSSEEERGAFVQQLWDFCVRWALGLHVAEMSEKELFRKAVTKQQRERILEIFFRHLFAQVLDINQADAGTLPLDSSQKVREALTCELSRAEFAESLGLKPQDMFVESMFSLADKDGNGYLSFREFLDILVVFMKGSPEDKSRLMFTMYDLDENGFLSKDEFFTMMRSFIEISNNCLSKAQLAEVVESMFRESGFQDKEELTWEDFHFMLRDHDSELRFTQLCVKGGGGGGNGIRDIFKQNISCRVSFITRTPGERSHPQGLGPPAPEAPELGGPGLKKRFGKKAAVPTPRLYTEALQEKMQRGFLAQKLQQYKRFVENYRRHIVCVAIFSAICVGVFADRAYYYGFALPPSDIAQTTLVGIILSRGTAASVSFMFSYILLTMCRNLITFLRETFLNRYVPFDAAVDFHRWIAMAAVVLAILHSAGHAVNVYIFSVSPLSLLACIFPNVFVNDGSKLPQKFYWWFFQTVPGMTGVLLLLVLAIMYVFASHHFRRRSFRGFWLTHHLYILLYALLIIHGSYALIQLPTFHIYFLVPAIIYGGDKLVSLSRKKVEISVVKAELLPSGVTYLQFQRPQGFEYKSGQWVRIACLALGTTEYHPFTLTSAPHEDTLSLHIRAVGPWTTRLREIYSSPKGNGCAGYPKLYLDGPFGEGHQEWHKFEVSVLVGGGIGVTPFASILKDLVFKSSLGSQMLCKKIYFIWVTRTQRQFEWLADIIQEVEENDHQDLVSVHIYVTQLAEKFDLRTTMLYICERHFQKVLNRSLFTGLRSITHFGRPPFEPFFNSLQEVHPQVRKIGVFSCGPPGMTKNVEKACQLVNRQDRAHFMHHYENF

SEQ ID NO: 693 - protein, 277 aa, Homo sapiens
MAYQDLHSEITSLFKDVFGTSVYGQTVILTVSTSLSPRSEMRADDKFVNVTIVTILAETTSDNEKTVTEKINKAIRSSSSNFLNYDLTLRCDYYGCNQTADDCLNGLACDCKSDLQRPNPQSPFCVASSLKCPDACNAQHKQCLIKKSGGAPECACVPGYQEDANGNCQKCAFGYSGLDCKDKFQLILTIVGTIAGIVILSMIIALIVTARSNNKTKHIEEENLIDEDFQNLKLRSTGFTNLGAEGSVFPKVRITASRDSQMQNPYSRHSSMPRPDY

SEQ ID NO: 694 - DNA, 157 bp, Homo sapiens
aaatataaatgatatgttgaaaacttaaggaagcaaatgctacatatatgcaatataaaatagtaatgtgatgctgatgctgttaaccaaagggcagaataaataagcaaaatgccaaaaggggtcttaattgaaatgaaaatttaattttgttttt

SEQ ID NO: 695 - DNA, 241 bp, Homo sapiens
ctggcccgacctctggcctcctcttccctggctgaatgtaaatatttaccagcatttagaaaaaaggagaaaaaagacagaactaaacccgtttaggaaaaagggaccgagggacagcagtggttaagtaatccactgaggacctgaaggggaaaatggacttacctttctcatatacttggcctggctaggacactgggtgccagacagccttctgaggggattttctttctaaatgagg

SEQ ID NO: 696 - DNA, 188 bp, Homo sapiens
  misc_feature 11, 29, 30, 59, 62, 165: n = A,T,C or G
gcccatgatgncagagctggaagagaggnnacgtcagcagaggggccacctccatttgntgnagacaagcatagatgggattctggctgatgtgaagaacttggagaacattagggacaacctgcccccaggctgctacaatacccaggctcttgagcaacagtnaagctgccataaatatttctcaa

SEQ ID NO: 697 - DNA, 289 bp, Homo sapiens
  misc_feature 50, 86, 207: n = A,T,C or G
ctgcttggacttcaaagccctccgcctagccatctcagccaggctcaggntccttctcccacccatcaggccaagcaggacttgtnaaacatacacattcaagttcctagcacacagtaggtgctaagtgggaattgattataaacttgaattcttccatcaacaaatatctacctctcctgtccagcttgcctcagatcttcaggntctctcttctctgaggcagctaagcttctacatccttcatgaagtttcctttacttctcgacagaagacagttccctttagg

SEQ ID NO: 698 - DNA, 193 bp, Homo sapiens
  misc_feature 171: n = A,T,C or G
aaagtttgtgctataaaattgtgcaaatatgttaaggattgagacccaccaatgcactactgtaatatttcgcttcctaaatttcttccacctacagataatagacaacaagtctgagaaactaaggctaaccaaacttagatataaatcctaccaataaaatttttcagntttaagttttacagtttgattt

SEQ ID NO: 699 - DNA, 279 bp, Homo sapiens
  misc_feature 60, 126: n = A,T,C or G
ccttccccccccttccttatgagttctaacttagtaatttcaaatgtgaccttttatatntaagaccagtatagtaaacttagcccacagtggcaaataatgagtaatattgtaatatgttccagngggataccctccttgtcttgaattttggctttgacattctcaatggtgtcactgggctcgacctcaagggtgatggttttgccagtgagggtcttcacaaagatctgcatgtttgcgtccgcacgaccgccgccaccaaccagctcggccgcc

SEQ ID NO: 700 - DNA, 340 bp, Homo sapiens
  misc_feature 174: n = A,T,C or G
ctgtccaatgacaacaggaccctcactctactcagtgtcacaaggaatgatgtaggaccctatgagtgtggaatccagaacaaattaagtgttgaccacagcgacccagtcatcctgaatgtcctctatggcccagacgaccccaccatttccccctcatacacctattaccgnccaggggtgaacctcagcctctcctgccatgcagcctctaacccacctgcacagtattcttggctgattgatgggaacatccagcaacacacacaagagctctttatctccaacatcactgagaagaacagcggactctatacctgccaggccaataactcagcca

SEQ ID NO: 701 - DNA, 277 bp, Homo sapiens
  misc_feature 13, 29, 109, 117, 182: n = A,T,C or G
ccactggctgagntattggcctggcaggnatagagtccgctgttcttctcagtgatgttggagataaagagctcttgtgtgtgttgctggatgttcccatcaatcagcnaagaatantgtgcaggtgggttagaggctgcatggcaggagaggctgaggttcacccctggacggtaataggngtatgagggggaaatggtggggtcgtctgggccatagaggacattcaggatgactgggtcgctgtggtcaacacttaatttgttctggattccac

SEQ ID NO: 702 - DNA, 255 bp, Homo sapiens
  misc_feature 27, 42, 86: n = A,T,C or G
ctgcgcgtcgccaaagtgacaggcggngcggcctccaagctntctaagatccgagtcgtccggaaatccattgcccgtgttctcanagttattaaccagactcagaaagaaaacctcaggaaattctacaagggcaagaagtacaagcccctggacctgcggcctaagaagacacgtgccatgcgccgccggctcaacaagcacgaggagaacctgaagaccaagaagcagcagcggaaggagcggctgtacccg

SEQ ID NO: 703 - DNA, 224 bp, Homo sapiens
  misc_feature 13, 42, 43, 74, 89, 179, 210, 216: n = A,T,C or G
cctgtttggaggngctgctcgaaagggtttgccctgagactnnaagaagaagctgcgggaaggacagcaggggncctggggttttagcntctggcccaggagttatgtgtccataaccaaagggagcacagtctgcacccagctctcatcccatcggagctgctgcgactcccgcaggntcttccggaactggtttagcttgcccgcagnatcagnaaagtttg

SEQ ID NO: 704 - DNA, 445 bp, Homo sapiens
  misc_feature 251, 313, 392, 427: n = A,T,C or G
aggtaaaaagcagcctgggcaagagaagtgggtgggtttaggagaatccctttcgaaaaattcagagcattattattaatccttcttaaattaaatgcagggccaagcatgctgcacgtggaatctggacaattttttgataaactttaaggctgctaaataatttacagaaactgtgaatgcattttcattttacgaggcaaaagagaaaatattcaagattgcatagcaattttattttttgaaatggntatcctaaagaatttccttaaattcagattttgcaaaattcctactctccaagtcatcaagngaacactaaaagcaactttactcgtgaatacaggggactctttacgaggcatgcatttttcataaatctaggccaaagngaactaattgagatttaattctaaattcatcctgngatttctgcatataatat

SEQ ID NO: 705 - DNA, 107 bp, Homo sapiens
  misc_feature 8, 29, 32, 46, 47, 54, 62, 70, 91, 102, 103: n = A,T,C or G
atcacccnatttaattaaaaatccctggnctnaggacctacagcanngtactgnagaacttnagaacctnaattagccatttgccatcttnagagagtcttnnccat

SEQ ID NO: 706 - DNA, 113 bp, Homo sapiens
  misc_feature 22, 105: n = A,T,C or G
aaatagtttctaaaggcaaggncttgctatgttgcttaggctggttttgaaaagtcccttttggggggatgctttcactgcttcacttcctttctatgacagctnagggaatc

SEQ ID NO: 707 - DNA, 283 bp, Homo sapiens
  misc_feature 47, 127, 132, 135, 159, 208, 221, 223, 236, 276: n = A,T,C or G
ctgctccaaggccatcaagatcttcatggggaggacggagctgaagntggaagacaagcaccgtgtggtgatccagcgtgatgagggtcaccacgtggcctacaccacgcgggaggtgggccagtanctggnggnggagtccagcacgggcatcatcgncatctgggacaagaggaccaccgtgttcatcaagctggctccctcctanaagggcaccgtgngnggcctgtgtgggnactttgaccaccgctccaacaacgacttcaccacgcgggnccacatg

SEQ ID NO: 708 - DNA, 341 bp, Homo sapiens
  misc_feature 182: n = A,T,C or G
ctgtccaatgacaacaggaccctcactctactcagtgtcacaaggaatgatgtaggaccctatgagtgtggaatccagaacaaattaagtgttgaccacagcgacccagtcatcctgaatgtcctctatggcccagacgaccccaccatttccccctcatacacctattaccgtccaggggngaacctcagcctctcctgccatgcagcctctaacccacctgcacagtattcttggctgattgatgggaacatccagcaacacacacaagagctctttatctccaacatcactgagaagaacagcggactctatacctgccaggccaataactcagccag

SEQ ID NO: 709 - DNA, 376 bp, Homo sapiens
  misc_feature 62, 110, 115, 116, 155, 167, 203, 218, 286, 320, 328, 337: n = A,T,C or G
ccaagtccaggggcgtggaggccgcccgggagcggatgttcaatggtgagaagatcaactanaccgagggtcgagccgtgctgcacgtggctctgcggaaccggtcaaanacacnnatcctggtagacggcaaggatgtgatgccagaggtcaanaaggttctgganaagatgaagtctttctgccagcgtgtccggagcggngactggaaggggtanacaggcaagaccatcacggacgtcatcaacattggcattggcggctccgacctgggacccctcatggngactgaagcccttaagtcatactcttcaggaggnccccgcgnctgggatgnctccaacattgatggaactcacattgccaaaaccctggc

SEQ ID NO: 710 - DNA, 232 bp, Homo sapiens
  misc_feature 42, 52, 62, 79, 83, 106, 134: n = A,T,C or G
ctgctgtatattcagcattgtgggaggagctgtgaaagacanagaacagtanagggtgtggnccctgccctcgagaggnttanagtctaggtggagaaacgggaancaggacacatggggagccgagagaaaanagtccaggccagtatgttacaggagctggaaggtgtttggggtcagaccccaatactccaagtacactaagcacttcagtgcctccaggggctcaacg

SEQ ID NO: 711 - DNA, 317 bp, Homo sapiens
  misc_feature 227: n = A,T,C or G
caggtaaaatagatttaatttaggaaagctcattttatatgagtttccaactaattattagagtcagaaacaaagaaaataaaatcagagaaaatcctctgtagaaaaaatacacaaagaacatttctacatgtgaaaaaacagtaaacagtgttaacatccaagttattagtctcaattccacgtctcctagtgaacaccactatcaaccttgagatctgatttgntcttgtcattcttcactgagtagatgaaatatgttaaggtgtctttttcattcactggaatagacctaaagtggcaaccaactatctcaa

SEQ ID NO: 712 - DNA, 154 bp, Homo sapiens
  misc_feature 2, 16, 30, 33, 55, 108, 130: n = A,T,C or G
tntgtagaaaaaatanacaaagaacatttntanatgtgaaaaaacagtaaacagngttaacatccaagttattagtctcaattccacgtctcctagtgaacaccactntcaaccttgagatctgatttgntcttgtcattcttcactgagtaga

SEQ ID NO: 713 - DNA, 177 bp, Homo sapiens
  misc_feature 102, 129: n = A,T,C or G
ccattcagaggtagaagatggaggggcggcagattctggcagggcagcagagggctctatgcacgggtttcaaacctgttttccacactctgtctttgcagntttggtaattctgtggtctatttatanagatattaaaatcttgtttataaaaaaaaaaaaaaaaaaaaaaaaaaa

SEQ ID NO: 714 - DNA, 216 bp, Homo sapiens
  misc_feature 46, 88, 200: n = A,T,C or G
ctgtgtttcggctataaaaaggcggctgaaagaaggggaaaattantttagacttaattggaagtttcatatggcacacattaccagnagagaaaaagatataaacggcaataaatattaggctcgatttgagaaactctccccacctcaatgctttcttttcccttgctatttaagggtctactttgcaacccgtgtgngtgtttgtgtgtgtgt

SEQ ID NO: 715 - DNA, 376 bp, Homo sapiens
  misc_feature 211, 294, 333, 352: n = A,T,C or G
ctgtgcgagtgtaccggatgcttccacctctcaccaagaaccagagaaaagaaagaaagtcgaagtccagccgagatgctaagagcaaggccaagaggaagtcatgtggggattccagccctgataccttctctgatggactcagcagctccactctgcctgatgaccacagcagctacacagttccaggctacatgcaggacttggaggnggagcaggccctgactccagctacaacagatgaggatgaggaagggaaattacctgaggacatcatgaagctcttggagcagncggagtggcagccaacaagcgtggatgggaaggggtacntactcaatgaacctggagnccagcccacctctgtctatggaga

SEQ ID NO: 716 - DNA, 96 bp, Homo sapiens
  misc_feature 59, 74, 77: n = A,T,C or G
aaactttttatttgcatattaaaaaaattgtgcattccaataattaaaatcatttgaanaaaaaaaaaatggcnctntgattaaactgcattacag

SEQ ID NO: 717 - DNA, 366 bp, Homo sapiens
  misc_feature 104, 224, 233, 343: n = A,T,C or G
gatggaaaggatacagatgacatcaagatccccatgctgttcttattcagcaaagaaggaagtatcatactggatgccatccgggaatatgaggaggtagaagngctcctctctgataaagcaaaagatcgagatcctgaaatggaaaatgaagaacaaccatcctctgaaaatgattctcagaatcagagtggtgaacagatttcatcaagttctcaggaggntgatttggntgatcaagagtcttctgaggaaaattctctaaattctcacccagaatcattatctctagcagatatggacaatgctgcaagcatttccccttctgaacagacttctaatnccacagaaaaccatgagactaca

SEQ ID NO: 718 - DNA, 200 bp, Homo sapiens
  misc_feature 17: n = A,T,C or G
aaacatctcacatatanaaaataggtacaatttaatttttctgcttgcccaagaaacaaagcttctgtggaaccatggaagaagatgaaaatgagactggcaaagaacaaatgctgaatctgaagaagatttgggcaaataatctgcatacttttaattgggaataagatggaaaatatgaatgctaaatcaaatttttt

SEQ ID NO: 719 - DNA, 336 bp, Homo sapiens
  misc_feature 71, 260, 314: n = A,T,C or G
ctgtctcacactttgcaagctgtgagagacacatcagagccctgggcactgtcactgcttgcagcctgagngtaactccctccttttctatctgagctcttcctcctccacatcacggcagcgaccacagctccagtgatcacagctccaaggagaaccaggccagcaatgatgcccacgatggggatggtgggctgggaagacagctcccatctcagggtgaggggcttgggcagaccctcatgctgcacatggcaggngtatctctgctcctctccagaaggcaccaccacagccgcccacttctggaaggntccatccccttgcaggccttgg

SEQ ID NO: 720 - DNA, 167 bp, Homo sapiens
  misc_feature 31, 46, 47: n = A,T,C or G
ggagagtgctagtgaggcggccaagaagtanatggaggagaatgannagctcaagaagggagctgctgttgacggaggcaagttggatgtcgggaatgctgaggtgaagttggaggaagagaacaggagcctgaaggctgacctgcagaagctaaaggacgagctgg

SEQ ID NO: 721 - DNA, 134 bp, Homo sapiens
  misc_feature 39, 56, 102: n = A,T,C or G
cctagtatgaggagcgttatggagtggaagtgaaatcanatggctaggccggaggncattaggagggctgagagggcccctgttaggggtcatgggctgggntttacgtgcgtgaggaggggcggagcttgcag

SEQ ID NO: 722 - DNA, 353 bp, Homo sapiens
  misc_feature 214, 290, 299: n = A,T,C or G
aaaaatatatacaactatgatgttcaaatatgtattctgagccattatgttcaaacataaatatctgggaaattcaaactgctgcaacaagttaggaaaggattaaggaaaaatgatgagctacaaattatgtagttggaggaagaaaaaaatgttacttagcatttatgtctggataggtatgtattttctaatttacatacacatatccagntgagtatagacaaccatcaaaatgtaaccagttacacagagactagactaagccaacactattttctataacaggnaacagtagngatttcaaaaattttaatatctcaatagtttcaccaaaaattatttatgggaat

SEQ ID NO: 723 - DNA, 268 bp, Homo sapiens
  misc_feature 67, 124, 156, 208, 241, 261: n = A,T,C or G
ctgagaagagcgccaggaagccctgggtgcgagagttgatgacgtcgatctcgtgcagggacacggngtgcaccacctccttgcgtttctggagctccccatctgggcactgcacgaacttggnctgggagcccatagcgtcgtagtcgcgggcgngtgtgaaggagcggcccaacttggagatcttgcccgtcgccttgtcgatggngatcacgtccccggcctggaccttgtccttggncagggactcaatcatcttgntgcccag

SEQ ID NO: 724 - DNA, 344 bp, Homo sapiens
  misc_feature 63, 191, 201: n = A,T,C or G
aaagaatcagcaaaatttcaaataaaaaattatgaaaatattatcctcattagttcatttagncccatgaaattaattattttctctgctcgatcttggtggacagtttcatgaagctgtcagttagttcattaaagttttggaaattctcagacagtgcagtggtatcagaaacttgtattcaagagtanaggtcagagncttcttttcttttctttttgagatggagtcttgctctgttgccagactggagtgcagtggtgcgatctgggctcactgcaatctccacctcccgggttcaagcgattctcctgcctcagcctcccgagtaactgggactacag

SEQ ID NO: 725 - DNA, 345 bp, Homo sapiens
  misc_feature 32, 90, 179, 223, 306, 339, 340: n = A,T,C or G
aaacaagagaaagtagacagatacatgttggnaaatgctaactgtccatattcacatagagacacagtgtactctctgagcccaatatanagagaaaggaggaaaaaagctagaattctatgcactactacacaggggcctagcaccctccagcttccagcagagcgaagggagcaggnttttcttttttcccacagagctcggggggttgattccatacagnttttgttcagacaggaagggataaaaatgaacttcgaacagaaaggggtagagactcttttcccattgtattctgctcaaggnatttccccccaaataaattgagaaccatggagnngagaa

SEQ ID NO: 726 - DNA, 305 bp, Homo sapiens
  misc_feature 112, 118, 187, 284: n = A,T,C or G
ttgcctgatgtcagagcccctccacacatgagcctgctccctactgccaacaccgtggcccagacagagacgctttccgaggaagaggtgaagctcctgcagtcgctgaagnaagganagcagatcgtgaggaaaaagggcgccgaggttgggggcatgtctctcttcttaccaagctagactgggntgccttttctaactattccagccctacagggcgaggggccataatggagtatcccgcccctttagaccccaggcgctcaccggcagggcaagaaggngaaatccagcagccgcgccag

SEQ ID NO: 727 - DNA, 387 bp, Homo sapiens
  misc_feature 131, 151: n = A,T,C or G
ccaacgaggcatcacctctgacggtgtcagtcatcgatgaccggctcaaggagaagatggtggtggagttccgccacatgaggaaccatgcctatgagccactcgccagcttcctagacttcattacttanagttacatgatcgacaacgngatcctgctcatcacaggcacgctgcaccagcgctccatcgctgagctcgtgcccaagtgccacccactaggcagcttcgagcagatggaggccgtgaacattgctcagacacctgctgagctctacaatgccattctggtggacacgcctcttgcggcttttttccaggactgcatttcagagcaggaccttaacgagatgaacatcgagatcatccgcaacaccctctacaagg

SEQ ID NO: 728 - DNA, 109 bp, Homo sapiens
ctgactgacagccagattgcagatgtggctcgcttttgtaaccgctaccctaatatcgaactatcttatgaggtggtagataaggacagcatccgcagtggcgggccag

SEQ ID NO: 729 - DNA, 329 bp, Homo sapiens
  misc_feature 247, 281, 304: n = A,T,C or G
aaagcataggactatagtcagcatgctagactgagaggtaaacactgatgcaattagaacaggtactgatgctgtcagtgtttaacactatgtttagctgtgtttatgctataaaagtgcaatattagacactagctagtactgctgcctcatgtaactccaaagaaaacaggatttcattaagtgcattgaatgtggctatttctctaagttactcatattgtcctttgcttgaatgcaatgccgngcagatttatgtggctgctatttttattttctgngcattactttaacaccttaaagngagaagcaaacatttccttcttcag

SEQ ID NO: 730 - DNA, 238 bp, Homo sapiens
  misc_feature 67, 204: n = A,T,C or G
aaaaagtggcagagtgacttaactgatcatgcatgatccctcatccctgaaattgagtttatgtagncattttacttattttattcattagctaactttgtctatgtatatttctagatattgattagtgtaatcgattataaaggatatttatcaaatccagggattgcattttgaaattataattattttctttgctgaagnattcattgtaaaacatacaaaataaacatatttt

SEQ ID NO: 731 - DNA, 297 bp, Homo sapiens
  misc_feature 202, 254: n = A,T,C or G
aaactgaattttttgaccttggaaaatatttttcttactttaccaaggtgaagtttccttaattagactaattattttatccccatcccagggtataaacaggaattgttttgatagtggtggagttattcactgcaacaaagcaacaatgttgtccatgattcaaaatctaagcagtttcgattttgcctgtgaatatggngtctgtcattcagggcatagctcactgtaggctagcctctgcttacttaagnctcttctctgacatactcaatggaagaatatttagatttattt

SEQ ID NO: 732 - DNA, 370 bp, Homo sapiens
  misc_feature 88, 104, 131, 184: n = A,T,C or G
ctgtcagtcttcctgaaatgaagaaactacaccagggctgctatatcagagcaaccccaaccagcactccaatcatgatgccgacagnggccccaattagaagntcaaaaacaaaaattaagttaggtagncagacatctataaatactagtatccgcatgaatgaaaacaccctggctttggnatggctacagaaatccatctggaaattattcaaaaggacgtggttcagggaaaagggggtaggcagggcatggggggaggggaacacacaaaacccccaagcagaggtaaaatgaatattggaacacacccgcagcaaacactgtacatagacttgaggcagatgcctctaacacaacacatatac

SEQ ID NO: 733 - DNA, 242 bp, Homo sapiens
  misc_feature 129: n = A,T,C or G
cctcctatttattctagccacctctagcctagccgtttactcaatcctctgatcagggtgagcatcaaactcaaactacgccctgatcggcgcactgcgagcagtagcccaagcaatctcatatgaagncaccctagccatcattctactatcaacattactaataagtggctcctttaacctctccacccttatcacaacacaagaacacctctgattactcctgccatcatgacccttgg

SEQ ID NO: 734 - DNA, 368 bp, Homo sapiens
  misc_feature 154, 188, 311: n = A,T,C or G
cctttcttgtaagtgaagaaaaaggaatgcagcaaagaagagttcgacattggagtccttagttccatcaggatcccattcgcagcctttagcatcatgtagaagcaaactgcacctatggctgagataggtgcaatgacctacaagattttgngttttctagctgtccaggaaaagccatcttcagncttgctgacagtcaaagagcaagtgaaaccatttccagcctaaactacataaaagcagccgaaccaatgattaaagacctctaaggctccataatcatcattaaatatgcccaaactcattgngactttttattttatatacaggattaaaatcaacattaaatcatcttatttacatgg

SEQ ID NO: 735 - DNA, 308 bp, Homo sapiens
  misc_feature 92, 101, 120, 216, 279: n = A,T,C or G
ctgtccaataggcgtagctatccggacagagcacgtttgcagaagggggactcttcttccaggtagctgaaaggggaagacctgacgtactntggttaggntaggacttgccctcgtggnggaaacttttcttaaaaagttataaccaacttttctattaaaagtgggaattaggagagaaggtaggggttgggaatcagagagaatggctttggnctcttgcttgtgggactagcctggcttgggactaaatgccctgctctgaacacgaagcttagnataaactgatggatatccctaccttgaaa

SEQ ID NO: 736 - DNA, 354 bp, Homo sapiens
  misc_feature 57: n = A,T,C or G
ccttctgctacgtagtctacaacagaaggattcaggcaattacctctgccatgcggnggaacatgggttcatacaaactcttcttaaggtaaccctggaagtcattgacacagagcatttggaagaacttcttcataaagatgatgatggagatggctctaagaccaaagaaatgtccaatagcatgacacctagccagaaggtctggtacagagacttcatgcagctcatcaaccaccccaatctcaacacgatggatgagttctgtgaacaagtttggaaaagggaccgaaaacaacgtcggcaaaggccaggacataccccagggaacagtaacaaatggaagcacttaca

SEQ ID NO: 737 - DNA, 198 bp, Homo sapiens
  misc_feature 59, 184: n = A,T,C or G
ctgccgctgcacacgctcgttcttctctgcctcagtgatgcgcttctcctcattgcggncatcccggatgccctcactagacagctccgcgctgtagcccgtgggctctgcgccctcatcctgcaagctctcctggacatggtagctcaccggctcgtacacggggggtggtgggggcgggggngctgtcatcaccag

SEQ ID NO: 738 - DNA, 228 bp, Homo sapiens
  misc_feature 36, 93, 202, 221: n = A,T,C or G
gtgccatggcacacagcctgggtgcacacccagcgncctctcttgcaggtgcaggtattgcagtccaccttgatcttggcgccggaagaatanaggtcgttgttatggacgcaagggcattccttctccaccacgcagccaccccggccgtcatccatcagcccgtcggggcacacacagccactgacacactctgtgtggnaatagccggcggccagcgnctggcag

SEQ ID NO: 739 - DNA, 378 bp, Homo sapiens
  misc_feature 124, 136, 169, 200, 230, 233, 247, 332, 339: n = A,T,C or G
aaaaaatacaggagtcgatagcagcagttggtgacgagatggcactcagaaacggcgttgacgtaatttaggacgtggaatcataagcgaaacagcacactgtttgaataaagagcgagtcggnatttatatttgnttttcttttgtcatgattatttgatttttaagntgctccagctaaggcatttttttgtattagnatttctattagggaacctttcttattaggnggnttgtattgtctggnttctaacatgcaggtagctgtttggcagttaaacacgtttagagtaatttgagttacaacgtgtgaaactgagcaaaaaagcagngataagnttgggttaccataccaaatatttgttttcccactggaaa

SEQ ID NO: 740 - DNA, 200 bp, Homo sapiens
  misc_feature 13, 95: n = A,T,C or G
ccacttgagtggntcctggctgcttctgtgattgttaggtcttgagagattatggacccgaggcattctgggtaccccatcaattggctgatggncttctatttgggctgcgcttcttctaaaaaggggagctcaaaggtctttttttcccccactgcagagctaaaaaagtccctgtacgccatcttctcccagtttgg

SEQ ID NO: 741 - DNA, 273 bp, Homo sapiens
ctgcttggcatcgtaatgggccggtggcatcatgagccccagaatcagccttgccaggtctccagagatctcagacttcaggtcagtcattaagtcccggccaaagtgagacttgaaggtctgccggatctgctgccgctggacattgctgcggtgcgtgatgatatcgatgattgtgtcttcgtcagtcccgagtcccttcatggctttccgcagcgctttggcatctgcgtcagggttgaagtcattggctgggcgcacaggtcccttcag

SEQ ID NO: 742 - DNA, 297 bp, Homo sapiens
  misc_feature 89, 188, 264, 266: n = A,T,C or G
ctgcagttgctccctttagggttataaaataatgacccaaatgttacatgtgttgatattataacttgtcagttactgatgtctgtggnatcctaccctcatctctgaaagggataatactgaataattattagaaaactataaaacttcacactttgtaccattaaaacctaaaattttaatcttgnccttttttactatggatcagtcggcactcgggaacagcagcaaggaaaagaggcaaatttcattcacatgttctgngntcatacctcttctctacctaattgttcattt

SEQ ID NO: 743 - DNA, 381 bp, Homo sapiens
  misc_feature 240, 243, 252, 291, 305, 321, 324, 327, 342: n = A,T,C or G
ctgcacctccacctccttgaagttgaagatactattgccatcaaagccagcagccagctctggacagtatgcctgcagggaacctccatgccggctcagtgacacactctctgcagccagggtaatgaacttgtcctcagctacaaaagctgtgagcttggctgtgctcacctccagggttaggtttagcagccgctttgggggtaatggctcaggggcacggccttctagctcagaagnagntcctgaagnctctagtgcaagggatggtacagtctcaggaaacacagnggctcttagtaggnctcggcactgtagagnggnggnatccccagagctggngatgatttggttgtcatccaggaagcggcaacacgacag

SEQ ID NO: 744 - DNA, 167 bp, Homo sapiens
  misc_feature 6, 78: n = A,T,C or G
cagcgnggggctcggagaggtgctcggattctcgtagctgtgccgggacttaaccaccaccatgtcgagcaaaagaanaaagaccaagaccaagaagcgccctcagcgtgcaacatccaatgtgtttgctatgtttgaccagtcacagattcaggagttcaaagagg

SEQ ID NO: 745 - DNA, 96 bp, Homo sapiens
ccacaaactcctctggctgtactccctcctgcaggagaccggcctcactgcactcagcaggctcttctccctgcgattcacttctgggacagtcac

SEQ ID NO: 746 - DNA, 391 bp, Homo sapiens
  misc_feature 257: n = A,T,C or G
ccattacgcagccgcttcagcaaacagggctcctcccggcccgagggcgggaccacagtggccgtcagcaggctgagatccgtctctgagatgttgatggggatgtcggcagcagagccgacctttaggtgggacatacgcatggagtcgtcacctgtgacccgggcagtgaaggggctgcctgggacgtgctgttcattgtacttgactagaatgctgtagtcccccggcagcacaggcaagtaggacacgctgcnatgtcccatcctggttgtcagtgcagtgttgcttgttcagtatctcaagcccagaaagatgaattaatccttgaaggaaatgacattgagcttgtttcaaattcagcggctttgattcagcaagccacaacagt

SEQ ID NO: 747 - DNA, 408 bp, Homo sapiens
  misc_feature 71, 233, 367: n = A,T,C or G
aaagttgtttgtgcctttttatttttgtttttaatgctttgatatttcaatgttagcctcaatttctgaanaccataggtagaatgtaaagcttgtctgatcgttcaaagcatgaaatggatacttatatggaaattctgctcagatagaatgacagtccgtcaaaacagattgcttgcaaaggggaggcatcagtgtccttggcaggctgatttctaggtaggaaatgtggnagcctcacttttaatgaacaaatggcctttattaaaaactgagtgactctatatagctgatcagttttttcacctggaagcatttgtttctactttgatatgactgtttttcggacagtttatttgttgagagngtgaccaaaagttacatgtttgcacctttctaggtgaaaat

SEQ ID NO: 748 - DNA, 337 bp, Homo sapiens
  misc_feature 34, 63, 224, 302: n = A,T,C or G
ggcggagagaggcgagcaccgggaaggggagcgnggggccgctggaatgggtgaatttaaggnccatcgagtacgtttctttaattatgttccatcaggaatccgctgtgtggcttacaataaccagtcaaacagattggctgtttcacgaacagatggcactgtggaaatttataacttgtcagcaaactactttcaggagaaatttttcccaggtcatgagnctcgggctacagaagctttgtgctgggcagaaggacagcgactctttagtgctgggctcaatggcgagattatggagnatgatttacaggcgttaaacatcaagtatgctatg

SEQ ID NO: 749 - DNA, 261 bp, Homo sapiens
  misc_feature 112, 151, 163, 226, 253: n = A,T,C or G
ccgggaggctctgattatttacccaccacaggtaggttgtgttctgaatctcaggttcacaggttaaggctacagcatcctcatcctccacggggttggagttgttgctggngatgaagggtttgggtggctctgcatagactgtgatcgncgtgactgtggncctattgaggccagtgtctgagttatgggcttggcacgtataggatccactattattcacagngatgttggggataaagagctcttgggnggattgct

SEQ ID NO: 750 - DNA, 150 bp, Homo sapiens
  misc_feature 9, 56, 57, 146, 148, 149: n = A,T,C or G
aacgctgangacatgacatccaaagattactactttgactcctacgcacactttgnnatccacgaggagatgctgaaggacgaggtgcgcaccctcacttaccgcaactccatgtttcataaccggcacctcttcaaggacaaggngnng

SEQ ID NO: 751 - DNA, 288 bp, Homo sapiens
  misc_feature 131, 276: n = A,T,C or G
aaaacttttgttaagaaaaactgccagtttgtgcttttgaaatgtctgttttgacatcatagtctagtaaaattttgacagtgcatatgtactgttactaaaagctttatatgaaattattaatgtgaagnttttcatttataattcaaggaaggatttcctgaaaacatttcaagggatttatgtctacatatttgtgtgtgtgtgtgtgtatatatatgtaatatgcatacacagatgcatatgtgtatatataatgaaatttatgttgctggnattttgcatttt

SEQ ID NO: 752 - DNA, 248 bp, Homo sapiens
  misc_feature 188: n = A,T,C or G
ctggcactgaggattatatccatataagaattcaacagagaaacggcaggaagacccttactactgtccaagggatcgctgatgattacgataaaaagaaactagtgaaggcgtttaagaaaaagtttgcctgcaatggtactgtaattgagcatccggaatatggagaagtaattcagctacagggngaccaacgcaagaacatatgccagttcctcgtagagattggactggctaaggacgatcag

SEQ ID NO: 753 - DNA, 346 bp, Homo sapiens
  misc_feature 137, 313: n = A,T,C or G
ctgctagaaaacagggaagatattagccaatatggaattgccaggttcttcactgaatattttaacagtgtatgccagggaacacacattctctttcgagaattcagcttcgtccaagccaccccccacaatagggnatcatttttacgggccttctggagatgcttccgaactgtgggcaaaaatggcgatttgctgaccatgaaagaatatcactgtttgctgcaattactgtgtcctgatttcccgctggagctcactcagaaagcagccaggattgtgctcatggacgatgccatggactgcttgatgnctttttcagatttcctctttgccttccagatcc

SEQ ID NO: 754 - DNA, 100 bp, Homo sapiens
  misc_feature 22, 71: n = A,T,C or G
gtgccacaggcagccctggganataggaagctgggagcaaggaaagggtcttagtcactgcctcccgaagntgcttgaaagcactcggagaattgtgcag

SEQ ID NO: 755 - DNA, 405 bp, Homo sapiens
  misc_feature 214, 305, 366, 368, 378: n = A,T,C or G
tgtgggcccacttcccaaatctctggaggatctgcagcttactcataacaagatcacaaagctgggctcttttgaaggattggtaaacctgaccttcatccatctccagcacaatcggctgaaagaggatgctgtttcagctgcttttaaaggtcttaaatcactcgaataccttgacttgagcttcaatcagatagccagactgccttctggnctccctgtctctcttctaactctctacttagacaacaataagatcagcaacatccctgatgagtatttcaagcgttttaatgcattgcagnatctgcgtttatctcacaacgaactggctgatagtggaatacctggaaattctttcaatgngncatccctggntgagctggatctgtcctataacaagct

SEQ ID NO: 756 - DNA, 306 bp, Homo sapiens
  misc_feature 112, 157, 186, 271: n = A,T,C or G
ccttgggaaattacctggaaatgcgactgaaatcttccttcctgaggggtctgggctcttggaaatcaaaccctctcaggttgggtggctggacgattctcctcacacttanaatgggacaaggggaaccaggaggcccccaaggggatccctgggntccacacgaactcctcctaccctcattgngtgacagcagccatgcctcctcctggggatcaggatctattacctgtgcctggagaggaggggactcctcttctcacccgctggnctctggacacatactgtccaattcccctgtggcag

SEQ ID NO: 757 - DNA, 321 bp, Homo sapiens
  misc_feature 12, 46, 65, 79, 92, 127, 180, 186, 204, 208, 235, 275: n = A,T,C or G
ctggagggaggntccctgggaggtttttgtggattccttctgcagngactcccctggtttctggntctggggacccagngtccaggcgcagncttttagcacttctcagtgtagacgttgacagggntcttttcccgcttgaatcctgctgagtccccaaatctcttgacttgtcttggntacagncaccaccagagctgctcncagntttgacaaaagcagttgctgctgaagngatcgttttgaatcctatcatagcactggcaggtcccggnaaattcttacagtcagcaggcggacctcgtgtgagttgaatattcc

SEQ ID NO: 758 - DNA, 278 bp, Homo sapiens
  misc_feature 12, 54, 111, 149, 220, 226, 273: n = A,T,C or G
cgctcggcaagntctcccaggagaaagccatgttcagttcgagcgccaagatcntgaagcccaatggcgagaagccggacgagttcgagtccggcatctcccaggctcttntggagctggagatgaactcggacctcaaggctcagctnagggagctgaatattacggcagctaaggaaattgaagttggtggtggtcggaaagctatcataatctttgntcccgntcctcaaacctgcccgggcggccgcttcgagccctatagtgaggcgnattag

SEQ ID NO: 759 - DNA, 401 bp, Homo sapiens
  misc_feature 268, 301, 318, 321, 333, 367: n = A,T,C or G
gcaaactgcaaaccatggtgagaaattgacgacttcacactatggacagcttttcccaagatgtcaaaacaagactcctcatcatgataaggctcttacccccttttaatttgtccttgcttatgcctgcctctttcgcttggcaggatgatgctgtcattagtatttcacaagaagtagcttcagagggtaacttaacagagtatcagatctatcttgtcaatcccaacgttttacataaaataagagatcctttagtgcacccagngactgacattagcagcatctttaacacagccgngtgttcaaatgtacagnggnccttttcagagntggacttctagactcacctgttctcactccctgntttaattcaacccagccatgcaatgccaaataat

SEQ ID NO: 760 - DNA, 346 bp, Homo sapiens
  misc_feature 278, 335: n = A,T,C or G
ccgaggtttggatcatgggagaacagcagaaaggggttattgagggaacctacactgttctagctgcaccccatgcccttctcagaggaaagcctggcattgattagatactgggccagactaatactggcagcagagccagtgatagtaacctgcctaccagaggagccttccactgggttggcaattttgatctgggccccggacatctggcggatctcattaatgttggcgccttggcgcccgattatgcagccaattaagttatttggaatggngagttcatgggtggtttgagtagatgcatccaaacttgcccaatagcctttcacctntggagagacct

SEQ ID NO: 761 - DNA, 256 bp, Homo sapiens
  misc_feature 159, 185, 196: n = A,T,C or G
gagacagactgggtgatgacgctgaatctgcagaggtgctggtgaccaattcccctaaagcatctacttgtctcctcaaactgtgtaaagtgccctctgtctgccgctttcctttaattaatacttctgcttgcttggacatacagtgtcggagttggncctgaaaagtgtgataagacttaggnttttacacagnaagaaatgtaccagaactgctgctcagcttcctcacatacatttgataggcaaatctagc

SEQ ID NO: 762 - DNA, 321 bp, Homo sapiens
  misc_feature 12, 39, 162: n = A,T,C or G
tggactctggantgatgctggaagtagatacgaaaatgngaagaacaatggaacagcacactttctggagcatatggctttcaagggcaccaagaagagatcccagttagatctggaacttgagattgaaaatatgggtgctcatctcaatgcctatacctncagagagcagactgtatactatgccaaagcattctctaaagacttgccaagagctgtagaaattcttgctgatataatacaaaacagcacattgggagaagcagagattgaacgtgagcgtggagtaatccttagagagatgcaggaagttgaaaccaa

SEQ ID NO: 763 - DNA, 348 bp, Homo sapiens
  misc_feature 52, 66, 114, 127, 144, 152, 177, 200, 214, 261, 331: n = A,T,C or G
tgagaaaacataaagtaaccagcagatttcaatattaaaaagaagtggttcntcctaaaaaaggtnttagatcatagagttgggattagggtaggggatacctattaatctggnctggaaaaaaagngtgtggagaaggggagntgtattgntttctcacaagaggcaaacttcagncaaacaatgaagagatagtaggnagggagatgtgtgntagaccaaagactttctgattgctgataataacaaatttagcagctntctacaagtcaattaaaataccattctctgagacattttcagagaggagctaactaacacccacccaggnggaaaaatcattctaca

SEQ ID NO: 764 - DNA, 374 bp, Homo sapiens
  misc_feature 4, 59, 111, 129, 132, 198, 204, 242, 288, 327: n = A,T,C or G
agcnaagaaggaagctcctgcccctcctaaagctgaagccaaagcgaaggctttaaagnccaagaaggcagcgttgaaaggtgtccacagccacaaaaagaagaagatccncacgtcacccaccttccngcngccgaagacactgcgactccggagacagcccaaatatcctcggaagagcgctcccaggagaaacangcttgnccactatgctatcatcaagtttccgctgaccactgagnctgccatgaagaagatagaagacaacaacacacttgtgttcattgnggatgttaaagccaacaagcaccagattaaacaggctgngaagaagctgtatgacattgatgtggccaaggtcaacaccctgattc

SEQ ID NO: 765 - DNA, 288 bp, Homo sapiens
  misc_feature 181: n = A,T,C or G
aaatacaataattctgttattgataaaatttaaggcattttcattgccttttgcagatttactcataactacctaacaaggaaagaaggtataattatttcagattggattatttattctaaaattaaattcttcactaatttattctaagatgaatttaatagtccatcaggaaattggnttttataaagcttattttatgggcataaaatacaggaaaaggtaataataaatgccaaaccgtctctttactttatgaagccaaatatttcctcagacttggttttt

SEQ ID NO: 766 - DNA, 424 bp, Homo sapiens
  misc_feature 337: n = A,T,C or G
ttgtggttgtgcctgagggctctgcttccgacactcatgaacaggctatcttgcggttgcaagtcaccaatgttctgtctcagcctctgactcaggccactgttaaactagaacatgctaaatctgttgcttccagagccactgtcctccagaagacatccttcacccctgtaggggatgtttttgaactaaatttcatgaacgtcaaattttccagtggttattatgacttccttgtcgaagttgaaggtgacaaccggtatattgcaaataccgtagagctcagagtcaagatctccactgaagttggcatcacaaatgttgatctttccaccgnggataaggatcagagcattgcacccaaaactacccgggtgacatacgcagccaaagccaagggcacattcatcgcagacagccacca

SEQ ID NO: 767 - DNA, 302 bp, Homo sapiens
  misc_feature 203: n = A,T,C or G
ggctttctcaataagcctcagctttctaagatctaacaagatagccaccgagatccttatcgaaactcattttaggcaaatatgagttttattgtccgtttacttgtttcagagtttgtattgtgattatcaattaccacaccatctcccatgaagaaagggaacggtgaagtactaagcgctagaggaagcagccaagtcgnttagtggaagcatgattggtgcccagttagcctctgcaggatgtggaaacctccttccaggggaggttcagtgaattgtgtaggagaggttgtctgtgg

SEQ ID NO: 768 - DNA, 94 bp, Homo sapiens
  misc_feature 62, 63, 73, 86: n = A,T,C or G
ctgatctaaaagaagttactgaggaagatttgaataatcactttaagtctttgggaagcagnnatttgaaatnttgaggtgacagncttttaag

SEQ ID NO: 769 - DNA, 69 bp, Homo sapiens
  misc_feature 36, 40, 53: n = A,T,C or G
ctgcaagacgactccaacccaacaacaaccagatgngctncagcccagccggncttcagttccatattt

SEQ ID NO: 770 - DNA, 222 bp, Homo sapiens
ctgaacgcaaaccagccactttaattaagctaagcccttactagaccaatgggacttaaacccacaaacacttagttaacagctaagcaccctaatcaactggcttcaatctacttctcccgccgccgggaaaaaaggcgggagaagccccggcaggtttgaagctgcttcttcgaatttgcaattcaatatgaaaatcacctcggagctggtaaaaagagg

SEQ ID NO: 771 - DNA, 332 bp, Homo sapiens
  misc_feature 262: n = A,T,C or G
ctgctttccctcctatggctcccctggaacaggagggagagccaagggggcggcccagcctggacagcgcccgctcctgcctgggtgcacacacggcgggcctgagctccagcatctgagtttgggggtatgagaaacaggggagcagaaggagaagaaaactgcctgtgctgcaacacgtttcctcatttattttttctttctttttctttttttctttttttggagggagaggtccctgcaaggtcccttcccgggcagnggagggatggaaatgccgtcacagtagtagggactggagcgtctacaaggatggaggggagctactcagg

SEQ ID NO: 772 - DNA, 194 bp, Homo sapiens
aaaagaaagatcaattatatccatgcttaacaggatcagcaggagctttataaatgactttacagagactaataagggatttgatctttctttttttgttatcgaggcttttgaaatgtggaacttgtgtgttctgctttatatgttatattcaatatcttttcagatgcagtctatattttatgctgagtttt

SEQ ID NO: 773 - DNA, 272 bp, Homo sapiens
ccaattgatttgatggtaagggagggatcgttgacctcgtctgttatgtaaaggatgcgtagggatgggagggcgatgaggactaggatgatggcgggcaggatagttcagacggtttctatttcctgagcgtctgagatgttagtattagttagttttgttgtgagtgttaggaaaagggcatacaggactaggaagcagataaggaaaatgattatgagggcgtgatcatgaaaggtgataagctcttctatgataggggaagtagcgtc

SEQ ID NO: 774 - DNA, 314 bp, Homo sapiens
  misc_feature 18, 42, 45, 94, 95, 114, 117, 125, 143, 154, 198, 207, 222,245, 258, 287: n = A,T,C or G
gtgtcttgtacagttagntatattagcagccctctgagatgncgnatctatcggaaggatttcaaacaccaattgctttacctgaacaaatggnncttaccctttgaacagcanagngaccacgnagaaggaaggaaaagggnaaaatcgcttnagttaaactgaaattaaatgaacaataaggcaactatataagtnacttctagnagcattgcctgaganacaaattattgtttgataatttncattgtgaatagnaatccaatagatcatattgcttactttgntctttttatactatagaataatatttt

SEQ ID NO: 775 - DNA, 207 bp, Homo sapiens
cctgacagagctcagctcacactgggaagtgtggatgcagggtgcccttccctaccccagtgagaaggaagattccttacccatcttgcttcccccccagggaagatcatcatgcacgacccatttgccatgcggcccttttttggctacaacttcgggcactacctggaacactggctgagcatggaagggcgcaagggggcccag

SEQ ID NO: 776 - DNA, 196 bp, Homo sapiens
  misc_feature 37, 65, 100, 128, 139, 140: n = A,T,C or G
gtgaacggaggcactgtggccgagaagctggactggncccgcgagaggcttgagcagcaggtacntgtgaaccaagtgtttgggcaggatgagatgatcnacgtcatcggggtgaccaagggcaaagnctacaaagggnncaccagtcgttggcacaccaagaagctgccccgcaagacccaccgaggacctcggc

SEQ ID NO: 777 - DNA, 325 bp, Homo sapiens
  misc_feature 55, 218, 239: n = A,T,C or G
aaagttgaactaagattctatcttggacaaccagctatcaccaggctcggtaggnttgtcgcctctacctataaatcttcccactattttgctacatagacgggtgtgctcttttagctgttcttaggtagctcgtctggtttcgggggtcttagctttggctctccttgcaaagttatttctagttaattcattatgcagaaggtataggggttagnccttgctatattatgcttggntataatttttcatctttcccttgcggtactatatctattgcgccaggtttcaatttctatcgcctatactttatttgggtaaatgg

SEQ ID NO: 778 - DNA, 421 bp, Homo sapiens
  misc_feature 147, 191, 228, 231, 233, 280, 366, 384: n = A,T,C or G
ccaaaagaagtaagacagcttgctgaagatttcctgaaagactatattcatataaacattggtgcacttgaactgagtgcaaaccacaacattcttcagattgtggatgtgtgtcatgacgtagaaaaggatgaaaaacttattcgnctaatggaagagatcatgagtgagaaggagaataaaaccattgnttttgtggaaaccaaaagaagatgtgatgagcttacncananaaatgaggagagatgggtggcctgccatgggtatccatggtgacaanagtcaacaagagcgtgactgggttctaaatgaattcaaacatggaaaagctcctattctgattgctacagatgtggcctccagagngctagatgtggaagatgngaaatttgtcatcaattatgactaccctaactcctca

SEQ ID NO: 779 - DNA, 330 bp, Homo sapiens
ctgaactttccgcttacgctgcccagagctgccaggtgtagactgagaattcgagttttgtttcttccttggggttgtatctgcagccttttctccctgggactccctgtctgctgccaatggagttgaagaactggaatgatgacacagctcctcttctcttattttctttgctggcctctccggtgtctgggagcgggaggaggcttgggctagagaagggtgatgaactggggccatttctcttccagagctgtgagatgcctcgagtggagctgtaggaactggtaatggcattgcggctggagctagggatgccacttgcgtaag

SEQ ID NO: 780 - DNA, 279 bp, Homo sapiens
gagaggtagagtttttttcgtgatagtggttcactggataagtggcgttggcttgccatgattgtgaggggtaggagtcaggtagttagtattaggaggggggttgttagggggtcggaggaaaaggttggggaacagctaaataggttgttgttgatttggttaaaaaatagtagagggatgatgctaataattaggctgtgggtggttgtgttgattcaaattatgtgttttttggaaagtcatgtcagtggtagtaatataattgttgggacgatt

SEQ ID NO: 781 - DNA, 323 bp, Homo sapiens
ttgatcttctgcaggaaggtgcagcttttccatatcagctcaaccacgccgccagtccattcttaaggaactgccgactaggactgatgatgcattttagctttgagcttttgggggttattctaccaacaaacagtccattggaaagaaaacagtccctggaattaacagattagaatgttcacactggttaatctttttttaacaatgagcatgaaggtagcagaagctggtgtgtttccagatggttcttctaaccaaactaatttttcactgttgacaagcgaggcaagggttgcactggaccaaaggctgaggcttgg

SEQ ID NO: 782 - DNA, 264 bp, Homo sapiens
  misc_feature 47, 69, 195, 262: n = A,T,C or G
ttctagctttgccctcactccccggaaaaactgacactgacacaggngctctttccttgcccctttagntggtacctcagtggggaggcttccttaccaagaatgagttcctgaaacccagggccagagacaaggacaacttaggggaagacggggttttcggtggagccaggggcaaatcttaatgggaccagngggggataccccagagcccatggcctgactgcacagcctgcctggaggatgggtgcgcagttctgcnct

SEQ ID NO: 783 - DNA, 159 bp, Homo sapiens
ctgtgtgaaggcgacagtggtgcaggtcttcctgtggactagacgtcccagtcttgcctttcccttgataatgcagtaagggacccccattttacgacacagggcaggcaagaagacaaccagctcgatgggatccacgtcgtgtgcaatcaccaccag

SEQ ID NO: 784 - DNA, 128 bp, Homo sapiens
ctcggccctcttacaccattttgtttgattgtctagtccctgtttctttttctttctaatccttattcatttaagcaaaaccatacattatcttttccagtcctttcttgtattcttactgttttttt

SEQ ID NO: 785 - DNA, 346 bp, Homo sapiens
  misc_feature 142, 323, 325, 330: n = A,T,C or G
ctgggctgatgctggaactcgtagaagtacacaggggcccgggaacactgaaaatgtgctacttggagtgcagggatcacaaacatggagtccgccatcatctcctggaactgcgcttggagggtctggggatccccattgnccccaatgtactcctccctcagcaggtcaccaaatgtaggaggcaacatcagcagcgttaacattttctgcagagcagcctgggaggcctctctgtccatttccttctgggtatcatagatcctcatgaccttggggatgagccagccgaattcattgttgttgacaccaacaatgctagngnacagnctgaaagtcggcagag

SEQ ID NO: 786 - DNA, 118 bp, Homo sapiens
ctgcactgatctgtggggagagttttacagacttttcattccagcctcctccattgacagtgaggtcttcattcaatcctgaagaaacctgaagtgtagaatctccttttccagattt

SEQ ID NO: 787 - DNA, 257 bp, Homo sapiens
cactcattcatcgacctccccaccccatccaacatctccgcatgatgaaacttcggctcactccttggcgcctgcctgatcctccaaatcaccacaggactattcctagccatgcactactcaccagacgcctcaaccgccttttcatcaatcgcccacatcactcgagacgtaaattatggctgaatcatccgctaccttcacgccaatggcgcctcaatattctttatctgcctcttcctacacatcgggcgagg

SEQ ID NO: 788 - DNA, 155 bp, Homo sapiens
  misc_feature 15, 22, 34, 38, 45, 69, 73, 127: n = A,T,C or G
cgcaagagcctatgnatgtggnatccagaactcngtgngcgcaanccgcagagacccagtcaccctggntgtnctctatgggccggacacccccatcatttcccccccagactcgtcttacctttcnggagcgaacctcaacctctcctgccact

SEQ ID NO: 789 - DNA, 382 bp, Homo sapiens
  misc_feature 203, 225: n = A,T,C or G
cctaagtaaatgaagagctgtaccatattcatgtattggaagacaacattgtaaagatgacatggtttaccagattaatctataaattcaatacaaatccaatcaaaatttcaatgctcttgggtttgtttgatttataaattgttggtctaattctagaagtaatatggaggaacagttggctaagaatagccaagacactncaaggaagaacaattttgtggngatactggagacagaggtgaaattggttacaattatgacaaaatgtggaggcatcttggtttttatcagaccttttcctaaagttgcaataatcaggactgtactgtactgctacaagattagacaaattgatgtcagtcagaatagaaatcatcaa

SEQ ID NO: 790 - DNA, 273 bp, Homo sapiens
  misc_feature 61, 96, 108, 129, 130, 184, 216: n = A,T,C or G
ggatccgctacacagtttctgccagtccctgagttgatgccttttcggctaactcgccagnttatcaatctgatgttaccaatgaaagaaacggtncttatgtacagnatcatggtacacgcactccgnnccttccgctcagaccctggcctgctcaccaacaccatggatgtgtttgtcaagnagccctcctttgattggaaaaattttgaacanaaaatgctgaaaaaaggagggtcatggattcaagaaataaatgttgctgaaaaaaat

SEQ ID NO: 791 - DNA, 344 bp, Homo sapiens
  misc_feature 100: n = A,T,C or G
aaagaatcagcaaaatttcaaataaaaaattatgaaaatattatcctcattagttcatttagtcccatgaaattaattattttctctgcttgatcttggnggacagtttcatgaagctgtcagttagttcattaaagttttggaaattctcagacagtgcagtggtatcagaaacttgtattcaagagtacaggtcagagccttcttttcttttctttttgagatggagtcttgctctgttgccagactggagtgcagtggtgcgatctgggctcactgcaatctccacctcccgggttcaagcgattctcctgcctcagcctcccgagtaactgggactacag

SEQ ID NO: 792 - DNA, 227 bp, Homo sapiens
  misc_feature 97, 215: n = A,T,C or G
gacaaacctgaaattgaagatgttggttctgatgaggaagaagaaaagaaggatggtgacaagaagaagaagaagattaaggaaaagtacatcgatnaagaagagctcaacaaaacaaagcccatctggaccagaaatcccgacgatattactaatgaggagtacggagaattctataagagcttgaccaatgactgggaagatcacttggcagngaagcatttttc

SEQ ID NO: 793 - DNA, 328 bp, Homo sapiens
aaacaagtcatttttcttgatcgttgtggaaggtttggagccttagaggtatgtcagaaaaaatatgttggtattctcccttgggtagggggaaatgacctttttacaagagagtgaaatttaggtcagggaaaagaccaagggccagcattgctacttttgtgtgtgtgtgtgggttttgttttgtttttttggttggccggttgttttcgttgttgttaacaaaggaatgagaatatgtaatacttaaataaacatgaccacgaagaatgctgttctgatttactagagaatgttcccaatttgaatttagggtgattttacctgc

SEQ ID NO: 794 - DNA, 290 bp, Homo sapiens
ccagcgagcacatgaagcggttcttcatgaactttgtggttgggcaggatccgggctcagacgccgccttccacttcaatccgcggtttgacggctgggacaaggtggtcttcaacacgttgcagggcgggaagtggggcagcgaggagaggaagaggagcatgcccttcaaaaagggtgccgcctttgagctggtcttcatagtcctggctgagcactacaaggtggtggtaaatggaaatcccttctatgagtacgggcaccggcttcccctacagatggtcacccac

SEQ ID NO: 795 - DNA, 343 bp, Homo sapiens
aaaatcaaagaaatccttgttttgaaaattggatcttaatctcaaaattgtagaacttggctgagaccattgctttcattttgaaaatgaacttcaactccagaaagaccagtgtgtgctctgccaaataaatttctgagtcacagtctcactaggaatgtgcaaatcaaagcatatgttggtgtaaattcttttgaagtccttgccaagataatcaatggcatttacatttgcttttttctttaataaaaattccaccattttcacttttcttcgactcacagcaagtaacagtggctgatattcattcttgctgcattcttcaatatttgtaccatgtgaa

SEQ ID NO: 796 - DNA, 354 bp, Homo sapiens
tggcgggccgctgaataagcttccaaaatgatgcccacaccagttattctattgaaagaggggactgatagctcccaaggcatcccccagcttgtgagtaacatcagtgcctgccaggtgattgctgaggctgtaagaactaccctgggtccccgtggcatggacaagcttattgtagatggcagaggcaaagcaacaatttctaatgatggggccacaattctgaaacttcttgatgttgtccatcctgcagcaaagactttggtagacattgccaaatcccaagatgctgaggtgggtgatggcaccacctcagtgaccttgctggctgcagagtttctgaagcagacctgc

SEQ ID NO: 797 - DNA, 309 bp, Homo sapiens
ctgtgccgtctgcctgagcccatggatgctttctcaatcctaggctggttactgtgtaagcgttttggagtacggggccttgagcgggtgggagctgtgtgttgaagtacagagggaggttggggtgggtcagagccgagttaagagattttctttgttgctggaccccttcttgaaggtagacgtcccccacccggagagacgtcgcgctgtggcctgaagtggcgcaagcttgctttgtaaatatctgtggtcccgatgtagtgcccagaacgtttgtgcgaggcagctctgcgcccgggttccagc

SEQ ID NO: 798 - DNA, 315 bp, Homo sapiens
ccaccagcattgacgttcttgccatccagaagagctgacagtgtcagtttaatacctggctttagagtctgagtgtatcctaaacctatcaggctggagttgttcactttagccgagaagcaggcgtcagggtcaatctgatacttggctgctattccgaagcgcgtgttactgtttcctgctgtccaggcaagattgacagcggtctccaacttcttgttcactttctggtaaatggagccgccaaactctgtcccgtcattcacattagtgtgaagctggaattcatcagtcttgtagccaactgcaaagttg

SEQ ID NO: 799 - DNA, 157 bp, Homo sapiens
ctgtgatttcctccatagttggcttctgggtcaggccataggcaatattttcttgaagacttcttccaaatacctgtggctcttgtcccactgcagccacctgcctgtgcaggtagcggtgctcatattggggaaggggcttcccatccaacagcag

SEQ ID NO: 800 - DNA, 357 bp, Homo sapiens
aaactcagtgaacccaaacctatttttttcaatctgaatattgctgcagcaaaaccaactccaccaaaaagccgggtaacattaacaaaagaattccctgtatcatctggatctcaacatcggaaaaaagaagcggatagtgtttatggagaatgggttcctgtcgagaaaaatggtgaagaaaacaaagatgatgataatgttttcagcagcaatttgccctcagagcctgtggacatctctacagcaatgagtgaacgggcacttgctcagaaaagactcagtgagaatgcatttgatcttgaagccatgagcatgttaaatagagctcaggaaaggattgatgcctgggctcag

SEQ ID NO: 801 - DNA, 359 bp, Homo sapiens
cctagggggcatatcaagggtttaatagactgggggaatgggcaacagaactggctaccttagaggctctggaatgccccccacccatccacccaccaatggaaggaaagtcaggcatcgcctaaaaggagtggtccctatctagccccaagtctggagcagaaagggcaggtccattctggcccaagtgacattgttagatcctgtcccctcccccaatcactgctgcttgccagggtgcctcttcacagttcccatgtggcagcagtagtggcagaggcagaagtggacttattgtagattgcagtacagatacatggacacaatcatggcagccagctcgaggcccccaattccag

SEQ ID NO: 802 - DNA, 207 bp, Homo sapiens
ccaggctcgggcaccacctcaatcacatccatgatcaagatccgccctcggcacgtgacctcctccccctgcatgaggcaggtcccggcggccacgtagcctttgaggcccgacacggtctcctcactgcgcagagacactgtcttcatgcaggtcacatgctcccactcctgcagctcgatcctggcattgggaatagcctcccag

SEQ ID NO: 803 - DNA, 311 bp, Homo sapiens
  misc_feature 88, 94, 188, 219, 274: n = A,T,C or G
cctatttcactgctgtgtagcctcagtgcctaacatgggtgccaaataaatattcgtagaattacactgaattgtaaaaaccattcgnttttgnttacaattgccaaaaatctcaaaaggccctgtatttatgtaattctttgaaattattattttattttgatttctcagttattgactggctgggngtgacttagtacataagtactcaatattatnaaaacctcaaataattgacttgattttacacaacatccttcccttttctacaagntaatttttttacaaatcatttgggttatctcctaaat

SEQ ID NO: 804 - DNA, 202 bp, Homo sapiens
ctgttcggatttaacttcatcttctggcttgccgggattgctgtccttgccattggactatggctccgattcgactctcagaccaagagcatcttcgagcaagaaactaataataataattccagcttctacacaggagtctatattctgatcggagccggcgccctcatgatgctggtgggcttcctgggctgctgcgggg

SEQ ID NO: 805 - DNA, 238 bp, Homo sapiens
ccaaccagtctggctggagtgatgcattcctggcccagcacacgatgcttaccctggatcccaacgtcaccggtgtcttcctgggaccctacccctttggcatcgatcctatttggagcctggctgccaaccacttgagcttcctcaactccttcaagatgaagatgtccgtcatcctgggcgtcgtgcacatggcctttggggtggtcctcggagtcttcaaccacgtgcactttgg

SEQ ID NO: 806 - DNA, 325 bp, Homo sapiens
  misc_feature 129, 141, 291: n = A,T,C or G
cctgaggtctgcggaaggtgggaggaggcagacgccctgcgtggcccatggtcggggcgtccacgccgaggccggcaacaaacgacagtatctcggattccttttttttttaattttttatactttggngtttcacttcgngctctgaatactgaataaccatgaatgactgaatagtttagtccagatttttacagaggatacatctatttttatcattatttggggtttgaaaaatttttttttacaccttctaatttctttatttctcaaagcagataattcttctgngtgaaaatgttttctttttttaatttaaggttta

SEQ ID NO: 807 - DNA, 289 bp, Homo sapiens
cctaaagggaactgtcttctgtcgagaagtaaaggaaacttcatgaaggatgtagaagcttagctgcctcagagaagagagaacctgaagatctgaggcaagctggacaggagaggtagatatttgttgatggaagaattcaagtttataatcaattcccacttagcacctactgtgtgctaggaacttgaatgtgtatgtttgacaagtcctgcttggcctgatgggtgggagaaggaacctgagcctggctgagatggctaggcggagggctttgaagtccaagcag

SEQ ID NO: 808 - DNA, 376 bp, Homo sapiens
aaacttaattaaagagcttgacaagctctgcatattcatgtgtcataagcagtatgtgacaaaaaaaactgtgcagtatgtaccccctcacgaaatttagtttggcagggaaaacaagatgcacatgttattataaattagaaaatggaagagaagtagaaataaatccatgagtattatatataagtaacagaacaaaaacaacaggataatgtatcccccccaaaggcccagtagagaccatcaaagctcattctgggggtagtcaaggagggagtggagggagaaaaagaacgcagaccttcaaccactaatgaaagaactgaaacatctgtatgtagaaaaaaggtaaaatcaactcactatcatcttcagc

SEQ ID NO: 809 - DNA, 243 bp, Homo sapiens
  misc_feature 19, 162, 174, 175, 182, 193, 198: n = A,T,C or G
ccatctcattttcaaagtncagagctacataacacagtttctccttgatgtcccggacaatctcacgctcagcagtagtaacgaaggaatagccacgctcagtcaggatcttcatgaggtagtcagtgagatctcggccagccagatccagacgcatgatgncatggggcaagnnatagccntcatagatggngacantgtgggtgacaccatctccagagtccagcacgatgccagttgtgc

SEQ ID NO: 810 - DNA, 274 bp, Homo sapiens
aaaaaacacgtttgttattaccaaaaagagacgtctttaggtaaaaataataaaaaccccatgctgcattgataatgcagatagttctatttatctggtcaacgggcaaaaagcaagcactttaggtcttcagctccaatcttttgttcatttcttattgctggaatttcatatttcttcttgttggatgactaaaccggatgatggtagagatggtaagccggcatttactcagccccgccctgctcagcctcgggagcggacgaattctcag

SEQ ID NO: 811 - DNA, 205 bp, Homo sapiens
ctggtggagatcatcaaggtgctgggaacaccaacccgggaacaaatccgagagatgaaccccaactacacggagttcaagttccctcagattaaagctcacccctggacaaaggtgttcaaatctcgaacgccgccagaggccatcgcgctctgctctagcctgctggagtacaccccatcctcaaggctctccccactagagg

SEQ ID NO: 812 - DNA, 199 bp, Homo sapiens
aaatattgctgctgctttgtagatgatgagaagaaatgttaaagtgctttctaaaaggaaattttttcacctttggaggagaatatattagagttgtgggtaatttttcacagccacctatgtacatactaattacccattggatacttatatctaaaagtctcatgctgaagtatagtttttgggaaagaatgatttt

SEQ ID NO: 813 - DNA, 334 bp, Homo sapiens
  misc_feature 40: n = A,T,C or G
cctcaccgccgatgcaaggatagtcatcaacagggcccgngtggagtgccagagccaccggctgactgtggaggacccggtcactgtggagtacatcacccgctacatcgccagtctgaagcagcgttatacgcagagcaatgggcgcaggccgtttggcatctctgccctcatcgtgggtttcgactttgatggcactcctaggctctatcagactgacccctcgggcacataccatgcctggaaggccaatgccataggccggggtgccaagtcagtgcgtgagttcctggagaagaactatactgacgaagccattgctctgcgacctgcc

SEQ ID NO: 814 - DNA, 358 bp, Homo sapiens
ctgaagcttggaacttctggacaagaaaaggcctggtttctggtggcctctatgaatcccatgtagggtgcagaccgtactccatccctccctgtgagcaccacgtcaacggctcccggcccccatgcacgggggagggagatacccccaagtgtagcaagatctgtgagcctggctacagcccgacctacaaacaggacaagcactacggatacaattcctacagcgtctccaatagcgagaaggacatcatggccgagatctacaaaaacggccccgtggagggagctttctctgtgtattcggacttcctgctctacaagtcaggagtgtaccaacacgtcaccggagagatgat

SEQ ID NO: 815 - DNA, 203 bp, Homo sapiens
ctggaagccggactcagccagggtgcgctactaccagagcctgcaggctcatctcaaggtggacgtgtacagacgctcccacaagcctctgcccaaggggaccatgatggagacgctgtcccggtacaagttctacctggccttcgagaactccttgcaccccgactacatcaccgagaagctgtggaggaacgccctggagg

SEQ ID NO: 816 - DNA, 92 bp, Homo sapiens
cggccgcagaagcgagatgacgaagggaacgtcatcgtttggaaagcgtcgcaataagacgcacacgttgtgccgccgctgtggctctaagg

SEQ ID NO: 817 - DNA, 367 bp, Homo sapiens
ttggaggactatttgaattttgcaaactatctcttgtgggtttttacaccactaatacttttaatacttccttactttactatctttcttctctaccttactattattttcttacacatttataagagaaagaatgtattgaaagaagcctactctcataatttatgggatggtgcaaggaaaacagtggcaactctgtgggatggacatgcagccgtttggcatggttatgaagttcatggaatggaaaaaataccagaagatggaccagcacttataattttttatcatggagctattcctatagatttttactatttcatggctaaaatatttatacacaaaggcagaacttgccgagtagtag

SEQ ID NO: 818 - DNA, 381 bp, Homo sapiens
aaataaaagtattacgtaactttgaaatttgtataaaattaaaagatagtaaaaacaactattctaacagaattcaaaacctgttatgcttcagtggagagattattcaagataagtccgtgggaaattgggagtacatttctactggcaaagttagtgataactatgcacttctgacaaaatgtgaaatggggggtatgggcgtgtcatatcatcatggtgcagatacgtggatgtgtgcttccaaacaatggcaacctaactgactgctggaaccatacaaaatacctgaaactactcagaaagaaggtgaaaattgcatgcaaaaattatttgaaaaatattgagctaacacaacatgaatttggaattataagtgag

SEQ ID NO: 819 - DNA, 109 bp, Homo sapiens
ccatggccgcttccagaccatggaggagaagaaagcattcatgggaccactgaagaaagaccgaattgcaaaggaagaaggagcttaatgccaggaacagattttgcag

SEQ ID NO: 820 - DNA, 309 bp, Homo sapiens
  misc_feature 110, 134, 164, 185, 235, 291, 304: n = A,T,C or G
ctggaaaaacctttcagcgaaccatttcagctcaggacacgttagcgtatgccacagctttgttgaatgaaaaagagcaatcaggaagcagtaatgggtcggagagtagncctgccaatgagaacggagacagncatctacagcagggttcagaatctcccatnatgattggtgagttgagaagngaccttgatgatgttgatccctagaggaacatgcccagcctgagaggagncaagacacaatactggatgctcagcaccttctttggaatcagaatctcgaaccctntggaagagcctgnagatt

SEQ ID NO: 821 - DNA, 236 bp, Homo sapiens
catccgcttcctgaatgctgagaatgcacagaaattcaaaacaaagtttgaagaatgcaggaaagagatcgaagagagagaaaagaaagcaggatcaggcaaaaatgatcatgccgaaaaagtggcggaaaagctagaagctctctcggtgaaggaggagaccaaggaggatgctgaggagaagcaataaatcgtcttattttattttcttttcctctctttcctttccttttttt

SEQ ID NO: 822 - DNA, 388 bp, Homo sapiens
  misc_feature 117, 360: n = A,T,C or G
gcgaggcaagatggagttagtgcaggtcctgaaacgcgggctgcagcagatcaccggccacggcggtctccgaggctatctacgggtttttttcaggacaaatgatgcgaaggttgntacattagtgggggaagacaaatatggaaacaaatactatgaagacaacaagcaattttttggccgtcaccgatgggttgtatatactactgaaatgaatggcaaaaacacattctgggatgtggatggaagcatggtgcctcctgaatggcatcgttggcttcacagtatgactgatgatcctccaacaacaaaaccacttactgctcgtaaattcatttggacgaaccataaattcaacgngactggcaccccagaacaatatgtacct

SEQ ID NO: 823 - DNA, 353 bp, Homo sapiens
  misc_feature 177, 297: n = A,T,C or G
aaaagtttggatctttttctcagcaggtatcagttgtaaataatgaattaggggccaaaatgcaaaacgaaaaatgaagcagctacatgtagttagtaatttctagtttgaactgtaattgaatattgtggcttcatatgtattattttatattgtacttttttcattattgatggnttggactttaataagagaaattccatagtttttaatatcccagaagtgagacaatttgaacagtgtattctagaaaacaatacactaactgaacagaagtgaatgcttatatatattatnatagccttaaacctttttcctctaatgccttaactgtcaaataattataacctttt

SEQ ID NO: 824 - DNA, 264 bp, Homo sapiens
  misc_feature 186, 223, 226, 249: n = A,T,C or G
ctgggtgcaggcgggctgagtccgaaaagagagtcagcaaagggagatggggtggggccgttttataggattagggaaggtaatggaaaattacagtcaaagggggtttgttctctggtgggcaggtgtggatctcacaaagtacactctcaagggtggggagaattacaaaggaccttcttaagngtgggggagattacaaagtacatttatcagttagggnggngcaggaacaaatcacaatgttgnaatgtcatcagttaa

SEQ ID NO: 825 - DNA, 361 bp, Homo sapiens
  misc_feature 210: n = A,T,C or G
aaaatccagtttgttgttaacaaaacctactgctgggtggttttgaatatattacttttaggcatgatctccccaatgtgtttttactccttttccggcttctaggacagaggtatgtagtcaaagaatcctatggtggatctgaattgggtttcagctactgtacctggtccttgtgaattaaaaaaataaagtcacaaaaaccatatnacaaaacaaattaaaataaatagacaaaatgaagctgtctccagaccttctgcattgacacacaggtttgaagtcaaccaaagcactcatgctaatctggatgggaacactagggagacagaaaccccagtatgaaaccatgtacttgagc

SEQ ID NO: 826 - DNA, 195 bp, Homo sapiens
  misc_feature 10, 26, 32, 44, 162, 179: n = A,T,C or G
ccccagaagngacgcagccctctatnggcccnaatcttcttcantcgctccaggtcttcacggagcttgttgtccagaccattggctaggacctggctgtattttccatcctttacatccttctgtctgttcaagaaccagtctgggatcttgtactggcgnggattctgcataatggngatcacacgttccacc

SEQ ID NO: 827 - DNA, 227 bp, Homo sapiens
caacggctcttcacagaccacctccttttctaaggaaaatggctggtatgacgtgatgagtgatacatattttgattcaggttttgtctctaaagtagcacttcttaccacagagatcaaggacttgggtaatattatgcttttttccttcaatggattaattttcttaatataaaaacagatgaataccaggctaagcactagaaagagtagtaaagcagcaacaa

SEQ ID NO: 828 - DNA, 242 bp, Homo sapiens
  misc_feature 65, 214, 222: n = A,T,C or G
atgtccggggagtcagccaggagcttggggaagggaagcgcgcccccggggccggtcccggaggntcgatccgcatctacagcatgaggttctgcccgtttgctgagaggacgcgtctagtcctgaaggccaagggaatcaggcatgaagtcatcaatatcaacctgaaaaataagcctgagtggttctttaagaaaaatccctttggtctggngccagttntggaaaacagtcagggtcag

SEQ ID NO: 829 - DNA, 374 bp, Homo sapiens
  misc_feature 339: n = A,T,C or G
gaggtcctgaaaaggaatacacttccatatcatgccatctcttacactggcattccttgcctatgcatgtgcatggcttgccctggtttagcttggaaactgattgaaagtcagagagatcactggctttgagacttgcttgggggacttgggtagcgtcagaggagtcttccttcttactctctgatgggagccttggaacagaagttctcaaaggctcaacgactgcccctgcgtgattagcatcgagagaagtagagctttctcctgcactgaactctttaggggatgaaattcccagcccactgctgccatcaggtgagtcagtctggcttttgngcttgagttgactgctggaagaagacgctattgta

SEQ ID NO: 830 - DNA, 325 bp, Homo sapiens
  misc_feature 239, 313: n = A,T,C or G
gttcaaagcagaaaatcctgagcctctagtgtttggtgtgaagtacaatgcaagttcttttgccaagttcacgcttattgtgacagatgtgaatgaagcacctcaattctcccaacacgtattccaagcgaaagtcagtgaggatgtagctataggcactaaagtgggcaatgtgactgccaaggatccagaaggtctggacataagttattcactgaggggagacacaagaggttggnttaaaattgaccacgtgactggtgagatctttagtgtggctccattggacagagaagccggaagtccatatcgngtacaagtggtg

SEQ ID NO: 831 - DNA, 85 bp, Homo sapiens
tggtaccgggccccccccctgagcgatggagcgtgggtagggagggtccacagtgtccactcgccgtgtgcgaaggttgactcgg

SEQ ID NO: 832 - DNA, 202 bp, Homo sapiens
aggcggagaggatcatgtccgggaactgcggggtagtagcgatctgggttacccagccgttgtggcccttgagggtgccacgaagggtcatctgctcagtcatggcggcggcgagagcgtgtgtcgctgcagcgacgaggatggcactggatggcttagagaaactagcaccacaacctctcctgccgtcgacgcggccgcg

SEQ ID NO: 833 - DNA, 503 bp, Homo sapiens
  misc_feature 434, 477, 495: n = A,T,C or G
ccggctggtcctgcatcgccatctgctggccgcgcggcacggccggttcctggagccagcaggagtcggaggctgcagggcttgaaggcctcttcaccgtgccctccagggagcctagctgccgaagtattcctgctggaacttctggaagtcttcctcggtgaacacggtgccctcagccttcttcttcttggtcttggccacaggccggtcacaggccttgcggccccggttctggcgcaaaatctgctggctcacagactcagccacggtgcttctcgtcctggtcagaaacttcaggtttactctgaggtggtctcgacactctcgcttccggtactcgtccagtgccgacttgggcacctttcccttggccgagttccgcagtttctgggcctgaattgccttcgtcttccggggccgtttcaccggancccctctcggcttggcctgacctggagggtcccggggggcctnggacgccgccagcagctncaggcccc

SEQ ID NO: 834 - DNA, 208 bp, Homo sapiens
atccagagacaatctgccggttgtcagaggagaaggccacactcagcacatccttggtatggcccacaaatcgcctcgtggtggtgcccgttgtgagatcccagaggcgcagggttccatcccaggagcctgagagggcaaactggccatctgaggagataaccacatcactaacaaagtgggagtgaccccgcagagcacgctgtgg

SEQ ID NO: 835 - DNA, 210 bp, Homo sapiens
  misc_feature 88: n = A,T,C or G
tgatgtgggcgattgatgaaaaggcggttgaggcgtctggtgagtagtgcatggctaggaatagtcctgtggtgatttggaggatcangcaggcgccaaggagtgagccgaagtttcatcatgcggagatgttggatggggtggggaggtcgatgaatgagtggttaattaattttattagggggttaattttgcggtcgacgcggccgc

SEQ ID NO: 836 - DNA, 426 bp, Homo sapiens
cggccgccacgctggttttgcatcttcaggagacgctcgtagccctcgcgcttctcctcggccaattcgcggaagaagtggctcacgccttccagagccacatcatcgcggtcgaaatagaagcccagagagaggtaggtgtaggaggcctgcaggtacaaattgaccaggctgttgacggctgcctccacgtcggtggaataattctgacgaatctgggagctcatggttggttggcaagaaggagctaaccacaaaaacggtgctggcaggtcccagaagcaggagatggccgagaagatggtcccggaggttgcaagcggagaggaaatcggagggcggtcggaggctggaagagagtccccggatctgttccgtccaaacactgttgaagcaagagacagacccgcggtcgacgcggccgcg

SEQ ID NO: 837 - DNA, 134 bp, Homo sapiens
ccagggccgtgggccgaccccggcggggccgatccgagggcctcactaaaccatccaatcggtagtagcgacgggcggtgtgtacaaagggcagggacttaatcaacgcaagcttatgacccgcacttactggg

SEQ ID NO: 838 - DNA, 538 bp, Homo sapiens
  misc_feature 480: n = A,T,C or G
ggcgtcctggtgcttaccacctggaaactggtgaggtggtgggagaactcctggtggaccctagtggaagccttccagtaatttcttgaagctgagcgctcaggtgagtagggcgacatctggtggccggttgttgaaggtcattgcagagaggaaggaagccgaggaggggagcctgcagtgagggcgtcctggggttctccggttctcaccacccttgggccacgccgtctagtccacacctgaggagttggtcaggtagaaggggcggatgaccgtgcggaagccgttgaagtgccctgccgggcaggggaaggaggaggtgctcttcgagctgttggtgtccagggcactgggaatcgcagccttccagccctcgaaatcggtgacgtctgccacgaagagcccttcgcagagcatcagggctttgttttcgtaggcaatggtgcgatctgagccgccagacttggtgaggcccangacagggagctcgtccgaggagcaggagaagccgtagttccagcagctctggatggtg

SEQ ID NO: 839 - DNA, 351 bp, Homo sapiens
aaggcggcaacggtggtgaaagatatagcaggcctggtctttgtacagcggatgctcgtgaagagggggcgagcggtagaaccttgggtccttgtagccgcggtcccagggcggaaagatcggccgcgccagccagggcacgaagtgcatcttccccgcaaaggtgatgggctccagtccagggatctcgtaccccctatccaggggaggaggctccgacttccgcgtggagcgcacgccccactcatacgccccgcgtctcggggccccgaagcccccaaggccgagctgcccggagccagctagcgcccgccttgcgggcccggacgccaatgccataccgatctgata

SEQ ID NO: 840 - DNA, 574 bp, Homo sapiens
tggcctgcaaggccgcggacagggcgagcaccgagtcgtacattttgcagctcatcatccccgtgctctgcgtgacgcagtccatccacagccccttgtacatggcctgggccgtgatgatgttgtcacccgcataggagctcatctgccactgcgggatggcggtgcaggccaccagacccacccagcccagcagggccatggagaagcccagcaactgcaggcccgaattggccatttccgccctcagaaaacactgggggcgccgggcgggagaccctacagtaaaacaaacgacacttggggggcagccccacaaaagaaaacttgaggtggagttttccggtcacccaaagagacaaaaagggtttgggccaggtgaatgcaaatcttgtcaccaaactacacacaaatcgacccctccagtgaagcgatggcctcgcggcacagggagtaggatacgccgggagggtggttccagacaaaattggtggtccccgaaggccaggcggttccctccggcgctctcggcgaccctaggcaaacaaaaggtggaggggccgtctgggcgcgt

SEQ ID NO: 841 - DNA, 195 bp, Homo sapiens
gacccaggggcacaggctcccagatgatagcccctctctgaatgagcacccaggcaacacagtccggggctgtgtgtagcaaacctgtcagcagctgcctcctgggacaaccacccccttacatgctatctatctaccagacaaatgaaagctcttcttaccccatctcccaggcaccccccagcaagggctctg

SEQ ID NO: 842 - DNA, 207 bp, Homo sapiens
  misc_feature 85, 87, 89, 101, 127, 138, 139, 147, 149, 150, 191: n = A,T,C or G
cggccgccctttttttttttttttcgttgaaaaccaataatttatcaaaacgctgcgtgtgtatgtgggggggagggtgtcacancncncagggcagcggngggcggacgcacaggcaggaaacggngcccggaaagnnggggcggnannttgccactggctggccatgcgggcgggcaggctaaacattnttgccgcgcaggcgca

SEQ ID NO: 843 - DNA, 62 bp, Homo sapiens
cgatggagcgtgggtagggagggtccacagtgtccactcgccgtgtgcgaaggttgactcgg

SEQ ID NO: 844 - DNA, 118 bp, Homo sapiens
ttgggtacactccctggtaccgggcccccccgatccggctgccagccctgaggccaagcacggctggagacccacgacctggcctgccgttgccctgagctgcagcctcggccccagg

SEQ ID NO: 845 - DNA, 99 bp, Homo sapiens
gtacactcccctggtaccgggcccccccactaccgagtcaaccttcgcacacggcgagtggacactgtggaccctccctacccacgctccatcgctcag

SEQ ID NO: 846 - DNA, 559 bp, Homo sapiens
  misc_feature 37, 552, 554: n = A,T,C or G
cggccgccctttttttttttttttggttgtggctganaatgctggagatgctcagttctctccctcacaaggtaggccacaaattcttggtggtgccctcacatctggggtcttcaggcaccagccatgcctgccgaggagtgctgtcaggacagaccatgtccgtgctaggcccaggcacagcccaaccactcctcatccaagtctctcccaggtttctggtcccgatgggcaaggatgacccctccagtggctggtaccccaccatcccactacccctcacatgctctcactctccatcaggtccccaatcctggcttccctcttcacgaactctcaaagaaaaggaaggataaaacctaaataaaccagacagaagcagctctggaacaaaaagtacaaaaagacagccagaggtgtgcggagagggtgaggtggccgcgtggacgtgggtagataatcgcatgcagcactggaactcctgatgaggggtggggtccccacttctcctcaaggtttgagggattggggggagggggtcagctgactcananaagta

SEQ ID NO: 847 - DNA, 430 bp, Homo sapiens
cggccgccacgctggttttgcatcttcaggagacgctcgtagccctcgcgcttctcctcggccagttcgcggaagaagtggctcacgccttccagagccacatcatcgcggtcgaaatagaagcccagagagaggtaggtgtaggaggcctgcaggtacaaattgaccaggctgttgacggctgcctccacgtcggtggaataattctgacgaatctgggagctcatggttggttggcaagaaggagctaaccacaaaaacggtgctggcaggtcccagaagcaggagatggccgagaagatggtcccggaggttgcaagcggagaggaaatcggagggcggtcggaggctggaagagagtccccggatctgttccgtccaaacactgttgaagcaagagacagacccgcgggacgtcgacgcggccgcg

SEQ ID NO: 848 - DNA, 546 bp, Homo sapiens
  misc_feature 146, 162: n = A,T,C or G
agagtaaagtgcagcctctccagacactggggccccagtgggcgtgggcgaagttgctggtaggaggagttggcggaagcacttggaactcctttataagtgtcagctgtgagattttaatttgatttgaaaatgagtaagtgcanaaagacaccagttcancagctagcaagtcccgcgtcattcagcccagatattcttgctgacatttttgaactctttgccaagaacttttcttatggcaagccacttaataatgagtggcagttaccagatcccagtgagattttcacctgtgaccacactgaatttaatgcatttcttgatttgaagaactccctaaatgaagtaaaaaacctactgagtgataagaaactggatgagtggcatgagcacactgctttcactaataaagcggggaaaatcatttctcatgttagaaaatctgtgaatgctgaactttgtactcaagcatggtgtaagttccatgagattttgtgcagctttccacttattccacaggaagcttttcagaatggaaaactg

SEQ ID NO: 849 - DNA, 196 bp, Homo sapiens
gaagtccttcagcaggccacgctcggacagggtgcgcctcaaggacttctttctgatgagggggaccttgtacatgatgcactcagagagcgccaccagacccagcagcagcagccacttcatggttcttcccgggtcccaactcgagggagaaggcgtcgacgcggccgcgaattccaccacactggactagtgg

SEQ ID NO: 850 - DNA, 543 bp, Homo sapiens
cactgatattggagaaaagcacatccggcataaagtgtaaaccagtgtctcaaacactggaagaaccgggagagcaaacatgatttttcttatttcctctaagtaatctttctttagtaaaacaacaagtgatctttggcatagattcatactttaaaggcattaatattgcatttatatcaggcaagcaactatacaaatatgctgagggccttgaaaataatcatcctcattttaaaggaaatagtgaaagcctgagtgtaaaggaccaacttaagttgtacacattcgatgttgggaactaacacacagcgatgggtgggaaggaaggatgttcaggcaaggttcttactcctttactcatctggttctggctttgggaaaaaataaggtttcatgtgctgggaaatacttagcagtaataagtaccaaaaaggaaacactgccctctcattttgcctagtaggaacttactgtggtgataagaaatatgaaacccattactctcttgaaccccatacttgggagtagatgcagagagct

SEQ ID NO: 851 - DNA, 190 bp, Homo sapiens
aggcggagaggatcatgtccgggaactgcggggtagtagcgatctgggttacccagccgttgtggcccttgagggtgccacgaagggtcatctgctcagtcatggcggcggcgagagcgtgtgtcgctgcagcgacgaggatggcactggatggcttagagaaactagcaccacaacctctcctgccgcc

SEQ ID NO: 852 - DNA, 407 bp, Homo sapiens
  misc_feature 38: n = A,T,C or G
aggcctcacagaggcgggggcagaaggcggcgacccanagccgccacatcccccgccttgggcgccgtcacagtccccagacgccctggactcctgcagtctacgaagacgcgcgggggacggcgtggttccgagagagggcgccaaaggcgacgtgccggccgccagctccaggccgagccccgagcgcctgcaggaacaggccccttcacccggcgcgggacgcagagctgcgagagaatcttgttcagcgcggactcaacgccagggcgccgcctagaggttggtctctgtctcggcctcacccgccgggagaccacagagctgcttccccagccgcccgccgccagaaattggaaaaaaaaaaatccagctggggtctaggaactcggcttctggcacctctg

SEQ ID NO: 853 - DNA, 626 bp, Homo sapiens
acagtcccagtactctttgctcagctttcggggccggcctcgtttccgcttcccgtgcttgggatcccccttcttgcagtcacgaaaaccatcgctggggaagagcttgccatcagtgggatccaggtccacgtcacttccaccggagtctgaggagtgggagctccgagaagcaccagtccctgcggtggagacgtcagagctgccgggggagggggctcctgcgccacagctgccggggtggtaggggctggcttgctgaccgtcgtccagcagctcctgggcaaaggggctgccctggtcaaagggccctgggtctagggcctcctggaaggccatgccatccttctccagcagctcaatgatccaactgagctcatcagaagagctggaagtgaggtctcgcagctgggcatggagttggtcccccagaggcccaaagaccagacgcagctcctcaagggcacaattgcagagggtggcgccatccatgtcacatcgtgagaagtcaatggcgcttgcgtcgtacttgttcttctccacttggtagctgatccagtccagaacctgcgtcttcgaccagaactggggctgttcccccaaccagctggccttctctgtaccct

SEQ ID NO: 854 - DNA, 218 bp, Homo sapiens
atgacggctgcccgaagccccccgagattgcacatggctatgtggagcactcggttcgctaccagtgtaagaactactacaaactgcgcacagaaggagatggagtatacaccttaaatgataagaagcagtggataaataaggctgttggagataaacttcctgaatgtgaagcagtatgtgggaagcccaagaatccggcaaacccagtgcagcgg

SEQ ID NO: 855 - DNA, 50 bp, Homo sapiens
gaggaacgaagaataaaggagattgtgaagaaacattctcagtttattgg

SEQ ID NO: 856 - DNA, 116 bp, Homo sapiens
tccactagtccagtgtggtggaattcgcggccgcgtcgacgccccgcgagcacagagcctcgcctttgccgatccgccgcccgtccacacccgccgccagctcaccatggatgatg

SEQ ID NO: 857 - DNA, 402 bp, Homo sapiens
ggcgacgaccccaagagggaggtgggccacgatttctacttcttttttcaccattcgacagttccactcttacacggcagccacatagtgttcttccatctagctctcggactgcatcagctgcatctcggggatcttcaaattcaacaaaagcaaagccgggtgggtttctagcaacccacacacttcggagtggtccatagtagccaaaagcccgttccaattccgtcttgttgccattgtttccaagattgcctacataaaccttacagtccaatggacaggaatcacgatgcatttcgagatctagggttaaaaaatgcggcggctcaaatccacacgctccgatgagtcttcccgctttcctccggcccaacaccaaccaacgtcgacgcggccgcg

SEQ ID NO: 858 - DNA, 172 bp, Homo sapiens
acattttatgacctctcccaataggggcagaggtgagcacccctggtgaaaagttaagactcagtgagtataaatacgccaagaagagctgtggcttctttcactggtgtcctcagaaaggctgtgagcagtgttggtggcatacctgtcacagcatctagcaaagcacctg

SEQ ID NO: 859 - DNA, 196 bp, Homo sapiens
aggcggagaggatcatgtccgggaactgcggggtagtagcgatctgggttacccagccgttgtggcccttgagggtgccacgaagggtcatctgctcagtcatggcggcggcgagagcgtgtgtcgctgcagcgacgaggatggcactggatggcttagagaaactagcaccacaacctctcctgccgccggtcga

SEQ ID NO: 860 - DNA, 538 bp, Homo sapiens; identical to SEQ ID NO: 838
  misc_feature 480: n = A,T,C or G

SEQ ID NO: 861 - DNA, 204 bp, Homo sapiens
aggcggagaggatcatgtccgggaactgcggggtagtagcgatctgggttacccagccgttgtggcccttgagggtgccacgaagggtcatctgctcagtcatggcggcgacgagagcgtgtgtcgctgcagcgacgaggatggcactggatggcttagagaaactagcaccacaacctctcctgccgcgtcgacgcggccgcg

SEQ ID NO: 862 - DNA, 217 bp, Homo sapiens
aatgtcaggggtgttgggggctttggctgggtcctgggtcttcgtgtagagacctggaggcgcttggttcttggggttctccaggattccagcctcgtagctgatgtgcatgaggttctcatccatgctccacgggttcttgggagtgaccgggatgggaatcccgtgttgctttgcgtactccatcaggtcattgcggcccttgaaccggttgtag

SEQ ID NO: 863 - DNA, 192 bp, Homo sapiens
aggcggagaggatcatgtccgggaactgcggggtagtagcgatctgggttacccagccgttgtggcccttgagggtgccacgaagggtcatctgctcagtcatggcggcggcgagagcgtgtgtcgctgcagcgacgaggatggcactggatggcttagagaaactagcaccacaacgtcgacgcggccgcg

SEQ ID NO: 864 - DNA, 147 bp, Homo sapiens
tttccccttgaagaagtagacccgctcccggccactgtagctatgggcagggagggccaaggctgcatccacgttgtccgggatgccatcgaagccgtcagagatatttcgggggtaatcagggtccaggacaccatcctcaaagcg

SEQ ID NO: 865 - DNA, 446 bp, Homo sapiens
cggccgctggacttggcttgagctgtgaggggtgggaggggaggatagcaccggaagatgctgctccgggcccaacaccagccctggccaggctctcccctcccaggggcagcgcccagtccccaggggctgccagagccctgtgtgccttgccgcattcccctgatgcagcttttggcaactgaaaggcagggctctcgctgagtgcacctggggcttcctgagcccatctgcggcggccccaccctggcctaggtgctgagtgcagctgctgcagacagcccctccctccttagtggagcctggagggtggggtgctcggggatgcaggcaggggcaggggctccagagccacaggtcagaagcagggctgggggaggggtggagccattcagcctcaggcaccctcacagctaggtgactaggggcagggacagaatggggtg

SEQ ID NO: 866 - DNA, 87 bp, Homo sapiens
tccctcaactggaccatgggcctgcccaccgacaatggccacgacagcgaccaggtgtttgagttcaacggcacccaggcagtgagg

SEQ ID NO: 867 - DNA, 123 bp, Homo sapiens
  misc_feature 2: n = A,T,C or G
cncctggtaccgggcccccccactttaaaatcttttgttaagaaataggaaagattaggaaatatcatactgcacctgaaatgctgcagcaggggtttttgtttgcttgtttttgtccttcag

SEQ ID NO: 868 - DNA, 634 bp, Homo sapiens
caggctgcggtaggtggcaatctcctgctccagccgcgacttgatgtccatgagccgctggtactcctgattctgccgctcactatcagctcgcacatcgcccagctgggcttcaataccgctgatcagcgcctggatatgcgccagctgggctccaaagcgcgcctccgtttctgccagtgtgtcttccaaggcagctttcatgctcagctgtgactgcagctcaatctcaagaccctgaagggtgcgccgcaggtcagtaacctcggacctgctcatctggagctgctccgtgtggccagcgacctcccggttcaattcttcagtccggctggtgaaccaggcttcagcatccttccggttctgctcggccatgacctcatattggcttcgcatgtcactcaggatcttggcgagatcggtgcccggagcggaatccacctccacactgacctggcctcccacttggcccctcagcgtactgatttcctcctcatggttcttcttcaggtaggccagctcttccttcaggccttcgatctgcatctccaggtcggtcctggccagggtcagctcatccagcaccctgcgcaggccgttgatgtcggcctccacgctcatgcgcagagcctgt

SEQ ID NO: 869 - DNA, 197 bp, Homo sapiens
aggcggagaggatcatgtccgggaactgcggggtagtagcgatctgggttacccagccgttgtggcccttgagggtgccacgaagggtcatctgctcagtcatggcggcggcgagagcgtgtgtcgctgcagcgacgaggatggcactggatggcttagagaaactagcaccacaacctctcctgccgccgtcgacg

SEQ ID NO: 870 - DNA, 579 bp, Homo sapiens
  misc_feature 155, 215, 224, 246, 262, 272, 288, 313, 316, 382, 426, 433,469, 482, 483, 507, 518, 521, 530, 564: n = A,T,C or G
cggccgcccttttttttttttttttttttttttttatggggccaattttaaatagttttatttaagacattgcattttccacttacaatacagtgtttataaagtgcaatgttatttccttcccctgtgcatatgttccatattcaagtattganaatgcccagtaacttactatagcagcttaactttttaaaactgccacagaatttgctacnaatttaggnccttcaaatgttttaaatgtgnggaacaatgctacatntacacttggntggcttaatcaacctnttcaatggggggccctgaggaagcnccnccagagggaggagctccaccaccaggaaatcccccaggcattcctcctggcatgcctcctgcactntggtacagcttggtgatgatggggttgcaaactttctccagctntttctgntgatgttcaaattcttccttctcagcagtctgattnttatcaagccagnngataatttcattacacttgtccanaatcttctgtntgncctcatcgntaatcttgccttgaagtttctcatcttcaacagntgctttcatgttgaa

SEQ ID NO: 871 - DNA, 518 bp, Homo sapiens
ctttctccttcttatagacgttccggacgggcatgaccggtccggtcagctgggtggccagtttcagttcttcagcagaactgtctcccttcttgggggccgagggcttcctggggaagaggatgagtttggagcggtactccttcagccgctgcacgttggcctgcagggactccgtggacttgttccgcctcctcggatccacagaaatgccgatggtccgggccaccttcttgtgaatgccggccaccctgagctcctccaggctgaagccgcggccggcgcgcaccttcgtgtggtaccgaaccgtggggcagcgcacgatgggccggatgggacccgacgcggggcgcggggcgatgcggcgcgccttggcttgccgggccttacgtctgcggatcttacgggccggctggttgaaccacgtggccacgcgccgctgccagtccttgtggaagtggggcttcaagaccatgccattccggctgggcgccatggctgcctacggccctgcggct

SEQ ID NO: 872 - DNA, 404 bp, Homo sapiens
ctaaacactgtccagcgcaggggggtgctagggaggtagcgtgacaacacgatggctgcgatgcctgaagtgatgaccacgatggcggaagtgacagagaggatgttgaccacgcagtactgcagagccaccgcatcttgaggggtgcccacgtagcgcagcactgtgccatggaacagggcagctgtgatgaagctcacatggcccagcaccaccagcaccaggcctgtcttcatcagcaccttccggaagtcgcccacactcaggcctccgaggcgcagacacatgtcggctccgcgctggtcccgcccccggcttcagcgcggctcccgaggctgcgggccgccgggggaccctgctcccatcccgctggcccgtcgcccgcgcgccccgcaccgtcgcgt

SEQ ID NO: 873 - DNA, 175 bp, Homo sapiens
ggctgccagcgcctctaccccgtgctgcagcagagcctggtgcgggccgcccgccgcaggggcgccgccgcccagccctgaaccagaagcctgagcaactacggacgcaagccgaggaccgtgctgccgccgtccacgaaaagacccgcgccatcggcctccagtttgcgtcgag

SEQ ID NO: 874 - DNA, 215 bp, Homo sapiens
ggtagagaaccctgcggctgcgctttcggtgcccgcgagaggcgctggggcgcccggcaggggccgctgcgggctccgggagagggtcgaaggtgaagatctcaggaccggagccccgccggggtcccgggatggtggagggggccggggtcggggcctgcaggatggtcatggtcgggtggcagctgcgagagtgacacatggtgagccgagcg

SEQ ID NO: 875 - DNA, 208 bp, Homo sapiens; identical to SEQ ID NO: 834

SEQ ID NO: 876 - DNA, 484 bp, Homo sapiens
gagcagctggtttctcctggacagcagcatctggctccgctcccttcggaactccaggtactccttattgtttttgagcttgttcatgcagtccatgagggctgggtagccacctgagaatcgccacaggtgcactgcctggtcctgctccccataccacgtgttccagttgcccacgagtgagcatgggtagtcctcatccaggtgaagcttgggcagcacagcctccgtgaggctgttgtaggcatccaggtattcaggctttacattgtgaaactggatcttatagaggttgctggtttccttcttggacagcagggtggagtgggcatccttccggggatccactttgtgaacaaagagggagcggaaccagctgccttcattgtccttggaatagaaacgcgccgcagctgcagacgcaacgtccccagcgcgaggccccgggccccccagcagccgccgcgccgtcacagagatgctg

SEQ ID NO: 877 - DNA, 558 bp, Homo sapiens
ggcgtcctggtgcttaccacctggaaactggtgaggtggtgggagaactcctggtggaccctagtggaagccttccagtaatttcttgaagctgagcgctcaggtgagtagggcgacatctggtggccggttgttgaaggtcattgcagagaggaaggaagccgaggaggggagcctgcagtgagggcgtcctggggttctccggttctcaccacccttgggccacgccgtctagtccacacctgaggagttggtcaggtagaaggggcggatgaccgtgcggaagccgttgaagtgccctgccgggcaggggaaggaggaggtgctcttcgagctgttggtgtccagggcactgggaatcgcagccttccagccctcgaaatcggtgacgtctgccacgaagagcccttcgcagagcatcagggctttgttttcgtaggcaatggtgcgatctgagccgccagacttggtgaggcccaggacagggagctcgtccgaggagcaggagaagccgtagttccagcagctctggatggtggggaggtagaccagggacca

SEQ ID NO: 878 - DNA, 503 bp, Homo sapiens
  misc_feature 132, 185: n = A,T,C or G
cggccgcaaccgcgcgaacccgaagtcgatgattttcaccggggccccgggcgtgtcgtcggcgtacaggatgttctccggcttgaggtcgcggtgcaccacgcccgcctcctcgtgcatgaagctcacggncgacacgaggctgcgcaggatctggcttgcttccgactcgctgaagtgccgcntcttgcggatgtgctccagcagctccccgccccgcagcagctccaggaccaggtacgtgtgcagctggtcgtgatgcacctcgtgcagattcaccacgttggggtgtgactggcacaggcgcagggcagccacttcgcgctgcgtgttcgcctccagcctgcgactgaggatcttgactgcgaactcctggccgctctggcgctggcggcagcggcgacacacagaaaagctgccctggcccagcgcaggctcccgcaggtccagctcgtactgctggaagaagggcgagtcctgcatcatagcgctcctggccaccg

SEQ ID NO: 879 - DNA, 78 bp, Homo sapiens
ctgcctcggctggcgggcggggggaggcggagagctcggggcacgcgctgccgtccggaccgcgtcgacgcggccgcg

SEQ ID NO: 880 - DNA, 211 bp, Homo sapiens
tgatgtgggcgattgatgaaaaggcggttgaggcgtctggtgagtagtgcatggctaggaatagtcctgtggtgatttggaggatcaggcaggcgccaaggagtgagccgaagtttcatcatgcggagatgttggatggggtggggaggtcgatgaatgagtggttaattaattttattagggggttaattttgcggtcgacgcggccgcg

SEQ ID NO: 881 - DNA, 373 bp, Homo sapiens
  misc_feature 37, 38, 88, 335: n = A,T,C or G
cccacagtggcttgtttccgcagtgcgcggccgtcannacccaactctggtccaccaggacacccgcgcagtggaacgagaggccgtngaagagcgagacctgccagggctgcgagccgcgcgcgcacggggcgccataggcttcggggtccaagcgcgtgtcgttttgggggagcagcgccgcctctgcggcccagagttgcgccatcagcagcggcagcagcttcgccagagcccgggcgccagaggcggcggagaggtggaggtgcggagctctcatggccaggatctgggagtcgccgataggaaggagggaggggacccagacgtgcctntgccctgcctgtggtctgccgcgtccgacacggccgcg

SEQ ID NO: 882 - DNA, 300 bp, Homo sapiens
  misc_feature 48: n = A,T,C or G
cggccgcgttttttttttttttttcagacaattcagcctttattttanaaaataattctgtagcttccactttctttcatgaaactgaggtcaggcaagaaacaaaaatccaccaagtcctctccatcctgccatggcgtcctggcctgtgaggacatggggcgcctgggagcgggcggggaggctgggcagcactgggccagaggcgtcctggtcactgctccacctggtcactgctccacctcatgctgagaggagcctgtgtgtcaaaccccaggggaaaaagggacaggcagatcg

SEQ ID NO: 883 - DNA, 230 bp, Homo sapiens
ggtagagaaccctgcggctgcgctttcggtgcccgcgagaggcgctggggcgcccggcaggggccgctgcgggctccgggagagggtcgaaggtgaagatctcaggaccggagccccgccggggtcccgggatggtggagggggccggggtcggggcctgcaggatggtcatggtcgggtggcagctgcgagagtgacacatggtgagccgagcggtcgacgcggccgcg

SEQ ID NO: 884 - DNA, 601 bp, Homo sapiens
  misc_feature 555: n = A,T,C or G
gcccccaattccagctgccacaccacccacggtgactgcattagttcggatgtcatacaaaagctgattgaagcaaccctctactttttggtcgtgagccttttgcttggtgcaggtttcattggctgtgttggtgacgttgtcattgcaacagaatgggggaaaggcactgttctctttgaagtagggtgagtcctcaaaatccgtatagttggtgaagccacagcacttgagccctttcatggtggtgttccacacttgagtgaagtcttcctgggaaccataatctttcttgatggcaggcactaccagcaacgtcaggaagtgctcagccattgtggtgtacaccaaggcgaccacagcagctgcaacctcagcaatgaagatgaggaggaggatgaagaagaacgtcacgagggcacacttgctctcagtcttagcaccatagcagcccaggaaaccaagagcaaagaccacaacgccggctgcgatgaggaagtagcccacgttgacaaactgcatggcactggacgacagtggcccgaagatcttcanaaaggatgccccatcgattgacacccagatgcccactgccaacagg

SEQ ID NO: 885 - DNA, 207 bp, Homo sapiens
  misc_feature 82, 83, 101, 127, 128: n = A,T,C or G
caggcggagaggatcatgtccgggaactgcggggtagtagcgatctgggttacccagccgttgtggcccttgagggtgccannaagggtcatctgctcagncatggcggcggcgagagcgtgtgtcnntgcagcgacgaggatggcactggatggcttagagaaactagcaccacaacctctcctgccgccggtcgacgcggccgcg

SEQ ID NO: 886 - DNA, 442 bp, Homo sapiens
  misc_feature 3, 10, 14, 17, 37, 41, 88, 122, 123, 152, 158, 282, 388, 422: n = A,T,C or G
cancttatanaaanggnaaaggaaaccccaacatgcntgcnctgccttggtgaccagggaagtcaccccacggctatggggaaattancccgaggcttagctttcattatcactgtctcccnnggtgtgcttgtcaaagagatattccgccnagccanattcgggcgctcccatcttgcgcaagttggtcacgtggtcacccaattctttgatggctttcacctgctcattcaggtaatgtgtctcaatgaagtcacacaaatgggggtcatttttgtcagnggccagtttgtgcagttccagtagtgactgattcacatttttttccaaatgtaatgcacactccattgcattcagcccgctctcccagtcatcacagtctggtttnttgatatcctgaaggaagattcggccacctcgtnggttctgcagcttcatcagt

SEQ ID NO: 887 - DNA, 222 bp, Homo sapiens
gctcaggctccaaagccagcaggaaagaggtagctcgggacgtggagccgccgcccaggtgcgccaggaccacctcggccgtcaccttagccaggtggctgcttaggtccactgtgcgcttcacgtcctcattgatcagcggcggtgcctcggaggaggcgctgcccggcgccggggcccaagtcccaagcaacaggagcagaaacaagccggcggctggcg

SEQ ID NO: 888 - DNA, 89 bp, Homo sapiens
ggtggcgtagcgcccgcttataaagccgcaacaccttttgctgatgggtcaggtagggtcccgacgccaagaacgccattacggccgcg

SEQ ID NO: 889 - DNA, 451 bp, Homo sapiens
  misc_feature 5: n = A,T,C or G
gcggncgctggacttggcttgagctgtgaggggtgggaggggaggatagcaccggaagatgctgctccgggcccaacaccagccctggccaggctctcccctcccaggggcagcgcccagtccccaggggctgccagagccctgtgtgccttgccgcattcccctgatgcagcttttggcaactgaaaggcagggctctcgctgagtgcacctggggcttcctgagcccatctgcggcggccccaccctggcctaggtgctgagtgcagctgctgcagacagcccctccctccttagtggagcctggagggtggggtgctcggggatgcaggcaggggcaggggctccagagccacaggtcagaagcagggctgggggaggggtggagccattcagcctcaggcaccctcacagctaggtgactaggggcagggacagaatggggtgaatt

SEQ ID NO: 890 - DNA, 66 bp, Homo sapiens
tccactagtccagtgtggtggaattcgcggccgcgtcgacctgctgcctcacccacagcttttgat

SEQ ID NO: 891 - DNA, 599 bp, Homo sapiens
  misc_feature 583: n = A,T,C or G
gggcgtcctggtgcttaccacctggaaactggtgaggtggtgggagaactcctggtggaccctagtggaagccttccagtaatttcttgaagctgagcgctcaggtgagtagggcgacatctggtggccggttgttgaaggtcattgcagagaggaaggaagccgaggaggggagcctgcagtgagggcgtcctggggttctccggttctcaccacccttgggccacgccgtctagtccacacctgaggagttggtcaggtagaaggggcggatgaccgtgcggaagccgttgaagtgccctgccgggcaggggaaggaggaggtgctcttcgagctgttggtgtccagggcactgggaatcgcagccttccagccctcgaaatcggtgacgtctgccacgaagagcccttcgcagagcatcagggctttgttttcgtaggcaatggtgcgatctgagccgccagacttggtgaggcccaggacagggagctcgtccgaggagcaggagaagccgtagttccagcagctctggatggtggggaggtagaccagggaccaggacaccctcttgtcctggaagangaagctggggtgttgt

SEQ ID NO: 892 - DNA, 113 bp, Homo sapiens
gtctcaaacaggaccgcatttccggcatttcggctggtgtccgtgttagtggccacctgggccagcaagtcattcatggtctcactgctctcctcgtggttccggcccaggat

SEQ ID NO: 893 - DNA, 208 bp, Homo sapiens
  misc_feature 160: n = A,T,C or G
gaggcggagaggatcatgtccgggaactgcggggtagtagcgatctgggttacccagccgttgtggcccttgagggtgccacgaagggtcatctgctcagtcatggcggcggcgagagcgtgtgtcgctgcagcgacgaggatggcactggatggcttanagaaactagcaccacaacctctcctgccggtcgacgcggccgcgaatt

SEQ ID NO: 894 - DNA, 67 bp, Homo sapiens
  misc_feature 9: n = A,T,C or G
gcgatggancgtgggtagggagggtccacagtgtccactcgccgtgtgcgaaggttgactcggtagt

SEQ ID NO: 895 - DNA, 58 bp, Homo sapiens
  misc_feature 50, 52: n = A,T,C or G
gcggccgcccttttttttttttttttttttttttttttttttttttcccncnctaaaa

SEQ ID NO: 896 - DNA, 177 bp, Homo sapiens
  misc_feature 24, 63, 84, 87: n = A,T,C or G
gacattttatgacctctcccaatnggggcagaggtgagcacccctggtgaaaagttaagactnagtgagtataaatacgccaanaanagctgtggcttctttcactggtgtcctcagaaaggctgtgagcagtgttggtggcatacctgtcacagcatctagcaaagcacctgaatt

SEQ ID NO: 897 - DNA, 542 bp, Homo sapiens
gctttctccttcttatagacgttccggacgggcatgaccggtccggtcagctgggtggccagtttcagttcttcagcagaactgtctcccttcttgggggccgagggcttcctggggaagaggatgagtttggagcggtactccttcagccgctgcacgttggtctgcagggactccgtggacttgttccgcctcctcggatccacagaaatgccgatggtccgggccaccttcttgtgaatgccggccaccctgagctcctccaggctgaagccgcggccggcgcgcaccttcgtgtggtaccgaaccgtggggcagcgcacgatgggccggatgggacccgacgcggggcgcggggcgatgcggcgcgccttggcttgccgggccttacgtctgcggatcttacgggccggctggttgaaccacgtggccacgcgccgctgccagtccttgtggaagtggggcttcaagaccatgccattccggctgggcgccatggctgcctacggccctgcggctcctggtcgacgcggccgcgaatt

SEQ ID NO: 898 - DNA, 165 bp, Homo sapiens
  misc_feature 3, 5, 40, 77, 79, 89, 96, 123: n = A,T,C or G
tancnatctgggttacccagccgttgtggcccttgagggngccacgaagggtcatctgctcagtcatggcggcggcnanagcgtgtgtngctgcancgacgaggatggcactggatggcttanagaaactagcaccacaacctctcgtcgacgcggccgcgaatt

SEQ ID NO: 899 - DNA, 67 bp, Homo sapiens
tccactagtccagtgtggtggaattcgcggccgcgtcgacgctgctgcctcacccacagcttttgat

SEQ ID NO: 900 - DNA, 77 bp, Homo sapiens
cttccaggtccagagctcccaggtttccaggttgcagtccctccagtcccagagctcccagggtttcggtttccagt

SEQ ID NO: 901 - DNA, 114 bp, Homo sapiens
gggccggggaggacggctgggggctccggggtcgcctgcacaattgcctgagcaggaggcgcaagtgggagatgacgataaagggcggggccagcgcgggccgagagtggaatt

SEQ ID NO: 902 - DNA, 64 bp, Homo sapiens
tacactactcctgaggatgctactcccgagcccggagaggacccacgcgtgacccgggccaagt

SEQ ID NO: 903 - DNA, 63 bp, Homo sapiens
tcaaaagctgtgggtgaggcaggtcgacgcggccgcgaattccaccacactggactagtggat

SEQ ID NO: 904 - DNA, 142 bp, Homo sapiens
tcctcagccagggagacagggaccaggcagcacaggcctgccagcaggaggatgccccacgagacagaagacggcattgtcgattcactgtcccaggtcaggtcgacgcggccgcgaattccaccacactggactagtggat

SEQ ID NO: 905 - DNA, 101 bp, Homo sapiens
tccactagtccagtgtggtggaattcgcggccgcgtcgacgccacctccgagagcctggatgtgatggcgtcacagaagagaccctcccagaggcacggat

SEQ ID NO: 906 - DNA, 506 bp, Homo sapiens
  misc_feature 233, 273, 302: n = A,T,C or G
gcggccgcacacacagccaggcgctaggctccctgcgggacctcgggaagggggaagagcgtcaacaatttacggagggtccagccgctgggtcagattgagacaaaccattgtgtggttgggtttgggtcagcaggctggagagggttctgttctttttgatcattatcgtttggggccccaagggagggtcttgggagccacctgagccccaaagctgggaaattcctcanagctgctcatgtcaggagccttctcactgctgctggcggnccagggtgcgtcccgcaccacaaagcctntggaaggtgccttggcctcttcgtgtgctgggggtttcatgtatacctgcagcgcctcactgtccaccacgtcagctaggtattcctcctccagattgaggatgtggtcgatggcttcctccacattctctgggagccccgtcacagtgacgcagttggggtctggggctccgctctgtgggaagcgaatgtccaccttgaatt

SEQ ID NO: 907 - DNA, 93 bp, Homo sapiens
tcccgctgcacaagttcacgtccatccgccggaccatgtcggaggttgggggctctgtggaggacctgattgccaaaggccccgtctcaaagt

SEQ ID NO: 908 - DNA, 238 bp, Homo sapiens
gggtagagaaccctgcggctgcgctttcggtgcccgcgagaggcgctggggcgcccggcaggggccgctgcgggctccgggagagggtcgaaggtgaagatctcaggaccggagccccgccggggtcccgggatggtggagggggccggggtcggggcctgcaggatggtcatggtcgggtggcagctgcgagagtgacacatggtgagccgagcggaggtcgacgcggccgcgaatt

SEQ ID NO: 909 - DNA, 190 bp, Homo sapiens
  misc_feature 25, 56, 92, 97, 125, 132, 137, 140, 149, 150, 152, 175, 181: n = A,T,C or G
gggcgtcctggtgcttaccacctgnaaactggtgaggtggtgggagaactcctggnggaccctagtggaagccttccagtaatttcttgaanctgancgctcaggtgagtagggcgacatctggnggccggntgttnaangtcattgcnnanaggaaggaagccgaggaggggancctgcngtgagggcg

SEQ ID NO: 910 - DNA, 93 bp, Homo sapiens; identical to SEQ ID NO: 907

SEQ ID NO: 911 - DNA, 261 bp, Homo sapiens
gggtccgtcagggctgaagacctgcccaggcacacaactcaccacggccggtagcccattctcgcaggtgacattcttcatggggtccagtgacacctgggggcccagcttgcagctggagatgtgggcctctgtgccggtgcagtccatggagaatggccagtagcgctgcttcctccgtgaggcaaacattttgtacactttggtattgtatgtcctctccccagggaagccaaacatgccgcagaccacgcgggaatt

SEQ ID NO: 912 - DNA, 67 bp, Homo sapiens
gcgatggagcgtgggtagggagggtccacagtgtccactcgccgtgtgcgaaggttgactcggtagt

SEQ ID NO: 913 - DNA, 545 bp, Homo sapiens
gctttctccttcttatagacgttccggacgggcatgaccggtccggtcagctgggtggccagtttcagttcttcagcagaactgtctcccttcttgggggccgagggcttcctggggaagaggatgagtttggagcggtactccttcagccgctgcacgttggcctgcagggactccgtggacttgttccgcctcctcggatccacagaaatgccgatggtccgggccaccttcttgtgaatgccggccaccctgagctcctccaggctgaagccgcggccggcgcgcaccttcgtgtggtaccgaaccgtggggcagcgcacgatgggccggatgggacccgacgcggggcgcggggcgatgcggcgcgccttggcttgccgggccttacgtctgcggatcttacgggccggctggttgaaccacgtggccacgcgccgctgccagtccttgtggaagtggggcttcaagaccatgccattccggctgggcgccatggctgcctacggccctgcggctcctgcgcgtcgacgcggccgcgaatt

SEQ ID NO: 914 - DNA, 295 bp, Homo sapiens
gctcggcatcagaccagttcctcagcttcctgaagtaaccatagcaattggacttgtggtaaaaccatccaggagcacagctgggtctcatgatgatatcacccaggactcctgttttggccaggcagctcagcaataggagcagccgcatgcttctggaagccatcttcctcctaccctgaggatgtagctagtgcaaggatctcagagaccttactagcgcttctttgaaactcctgggttctccttgatctgcaaatctgtttggcaaccaaggtcgacgcggccgcgaatt

SEQ ID NO: 915 - DNA, 391 bp, Homo sapiens
gctaaacactgtccagcgcaggggggtgctagggaggtagcgtgacaacacgatggctgcgatgcctgaagtgatgaccacgatggcggaagtgacagagaggatgttgaccacgcagtactgcagagccaccgcatcttgaggggtgcccacgtagcgcagcactgtgccatggaacagggcagctgtgatgaagctcacatggcccagcaccaccagcaccaggcctgtcttcatcagcaccttccggaagtcgcccacactcaggcctccgaggcgcagacacatgtcggctccgcgctggtcccgcccccggcttcagcgcggctcccgaggctgcgggccgccgggggaccctgctcccatcccgctgtcgacgcggccgcgaatt

SEQ ID NO: 916 - DNA, 559 bp, Homo sapiens
  misc_feature 538, 544: n = A,T,C or G
gggcgtcctggtgcttaccacctggaaactggtgaggtggtgggagaactcctggtggaccctagtggaagccttccagtaatttcttgaagctgagcgctcaggtgagtagggcgacatctggtggccggttgttgaaggtcattgcagagaggaaggaagccgaggaggggagcctgcagtgagggcgtcctggggttctccggttctcaccacccttgggccacgccgtctagtccacacctgaggagttggtcaggtagaaggggcggatgaccgtgcggaagccgttgaagtgccctgccgggcaggggaaggaggaggtgctcttcgagctgttggtgtccagggcactgggaatcgcagccttccagccctcgaaatcggtgacgtctgccacgaagagcccttcgcagagcatcagggctttgttttcgtaggcaatggtgcgatctgagccgccagacttggtgaggcccaggacagggagctcgtccgaggagcaggagaagccgtagttccagcagctctggatggnggggangtagaccagggacca

SEQ ID NO: 917 - DNA, 447 bp, Homo sapiens
  misc_feature 284, 287, 336, 360, 374, 392, 397, 400, 409: n = A,T,C or G
gctccttggcgagcacgtgaccccggcgggcacgcaggagggcaggcaggcccctgcgcaggcgctgggtggactgcttccaggtgtcatattggaagaacttgcccacggggtatctggggaagttgtccggaagcacggtcggaggggtcgacacgtccctctcggacttggcgggggtagcacagtacgtctccaggagggccaggtcacagctgcggaaacagcactcctcaacgatgccacggctgcgacggctcacacggcttgcgggcctgctgaantanaagccgcggtccccacagacgaactggagggtgtccaccagctccccgncgcacagggtctcactggggcggnaagcagcaatgcancacgaggcgaaggccaanaaggnganaagcaccancatcgacttccccattgggattcccattggtgtctgga

SEQ ID NO: 918 - DNA, 574 bp, Homo sapiens
gctccttggcgagcacgtgaccccggcgggcacgcaggagggcaggcaggcccctgcgcaggcgctgggtggactgcttccaggtgtcatattggaagaacttgcccacggggtatctggggaagttgtccggaagcacggtcggaggggtcgacacgtccctctcggacttggcgggggtagcacagtacgtctccaggagggccaggtcacagctgcggaaacagcactcctcaacgatgccacggctgcgacggctcacacggcttgcgggcctgctgaagtagaagccgcggtccccacagacgaactggagggtgtccaccagctccccgccgcacagggtctcactggggcggtaagcagcaatgcagcacgaggcgaaggccaagaaggtgagaagcaccagcatcgacttccccattgggattcccattggtgtctggaagccggcgacgctgccgcccacctccctgctgcgtgtcgcaaaccgaacagcgggcgttggccctcctgccggacactcctctgccagcgccgctctggccgagtcgcgggggccgaatgtgcgacg

SEQ ID NO: 919 - DNA, 139 bp, Homo sapiens
gccgcgctcgtcgtcgacaacggctccggcatgtgcaaggccggcttcgcgggcgacgatgccccccgggccgtcttcccctccatcgtggggcgccccaggcaccagggcgtgatggtgggcatgggtcagaaggatt

SEQ ID NO: 920 - DNA, 576 bp, Homo sapiens
  misc_feature 526, 553, 556, 571: n = A,T,C or G
ggtggacaccaccctcaagagcctgagccagcagatcgagaacatccggagcccagagggcagccgcaagaaccccgcccgcacctgccgtgacctcaagatgtgccactctgactggaagagtggagagtactggattgaccccaaccaaggctgcaacctggatgccatcaaagtcttctgcaacatggagactggtgagacctgcgtgtaccccactcagcccagtgtggcccagaagaactggtacatcagcaagaaccccaaggacaagaggcatgtctggttcggcgagagcatgaccgatggattccagttcgagtatggcggccagggctccgaccctgccgatgtggccatccagctgaccttcctgcgcctgatgtccaccgaggcctcccagaacatcacctaccactgcaagaacagcgtggcctacatggaccagcagactggcaacctcaagaaggccctgctcctccagggctccaacgagatcgagatccgcgccgagggcaacagccgnttcacctacagcgtcactgtcgatggntgnacgagtcacaccggnagcct

SEQ ID NO: 921 - DNA, 421 bp, Homo sapiens
  misc_feature 387, 408, 409, 413, 419: n = A,T,C or G
gcgcatctgcccgccctagtcggggaagagcaggaagccggagaagacgctgtcagagccctggatgcccaccatgtcgtagtagtcattgacagccagccacacctcctcgcccacctgcaacctcagcagcacaccgcccgagttgacctgattggttttggacgtgtggccacagaaggtgaccactttgacgccgctgcggtacagcagcacgcacaggttggctgtatgcgacgcgtggtagacaaagtagtagaggccggggactttgcaggtgaacttgccagtgctcgtgtcataatctccctgcgggttggtgaggaccgcgttgaatctgatcaggctgttgggtgcagggggctggtgggtctgccgagtgaccgngaacactgactggaatttctnnttgnatctgncc

SEQ ID NO: 922 - DNA, 177 bp, Homo sapiens
gacattttatgacctctcccaataggggcagaggtgagcacccctggtgaaaagttaagactcagtgagtataaatacgccaagaagagctgtggcttctttcactggtgtcctcagaaaggctgtgagcagtgttggtggcatacctgtcacagcatctagcaaagcacctgaatt

SEQ ID NO: 923 - DNA, 133 bp, Homo sapiens
tccactagtccagtgtggtggaattcgcggccgcgtcgacgcgagcagcggcggcggcgcggagagacgcagcggaggttttcctggtttcggaccccagcggccggatggtgaaatcctccctgcagcggat

SEQ ID NO: 924 - DNA, 216 bp, Homo sapiens
gggtagagaaccctgcggctgcgctttcggtgcccgcgagaggcgctggggcgcccggcaggggccgctgcgggctccgggagagggtcgaaggtgaagatctcaggaccggagccccgccggggtcccgggatggtggagggggccggggtcggggcctgcaggatggtcatggtcgggtggcagctgcgagagtgacacatggtgagccgagcg

SEQ ID NO: 925 - DNA, 649 bp, Homo sapiens
  misc_feature 441, 510, 603: n = A,T,C or G
ggcccccaattccagctgccacaccacccacggtgactgcattagttcggatgtcatacaaaagctgattgaagcaaccctctactttttggtcgtgagccttttgcttggtgcaggtttcattggctgtgttggtgacgttgtcattgcaacagaatgggggaaaggcactgttctctttgaagtagggtgagtcctcaaaatccgtatagttggtgaagccacagcacttgagccctttcatggtggtgttccacacttgagtgaagtcttcctgggaaccataatctttcttgatggcaggcactaccagcaacgtcaggaagtgctcagccattgtggtgtacaccaaggcgaccacagcagctgcaacctcagcaatgaagatgaggaggaggatgaagaagaacgtcacgagggcacacttgctctcagtcttancaccatagcagcccaggaaaccaagagcaaagaccacaacgccggctgcgatgaggaagtagcccacgntgacaaactgcatggcactggacgacagtggcccgaagatcttcagaaaggatgccccatcgattgacacccagatgcccactgccaacaggnctgcaccacacagaaagatgagcaaattgaagaggatcatcatggt

SEQ ID NO: 926 - DNA, 341 bp, Homo sapiens
gggtcctcaaactctcgaatgtacggcgcaatgccacaataaggttgattgtggtgtttttcatgtggcagtttctccaggggtggcaggtatggaatagggtcacggggggcaaagagggccagaaggttgggcggcaggaactgggtcatcttgccaagtcgcgtagcgccctcctcgctctggcgtctgtccggaggctcgcggcggctgcggcagcccctcagcaacaacaactcctgcttcggcttccactccgggggcgtccacgtccgtctgattccgtcgcccgctaagcgagcgcaccagaccgctgctcagcgtcgacgcggccgcgaatt

SEQ ID NO: 927 - DNA, 431 bp, Homo sapiens
  misc_feature 265, 298: n = A,T,C or G
gcggccgccacgctggttttgcatcttcaggagacgctcgtagccctcgcgcttctcctcggccaattcgcggaagaagtggctcacgccttccagagccacatcatcgcggtcgaaatagaagcccagagagaggtaggtgtaggaggcctgcaggtacaaattgaccaggctgttgacggctgcctccacgtcggtggaataattctgacgaatctgggagctcatggttggttggcaagaaggagctaaccacaaaaacggngctggcaggtcccagaagcaggagatggccganaagatggtcccggaggttgcaagcggagaggaaatcggagggcggtcggaggctggaagagagtccccggatctgttccgtccaaacactgttgaagcaagagacagacccgcggtcgacgcggccgcgaatt

SEQ ID NO: 928 - DNA, 538 bp, Homo sapiens
gtggcctgcaaggccgcggacagggcgagcaccgagtcgtacattttgcagctcatcatccccgtgctctgcgtgacgcagtccatccacagccccttgtacatggcctgggccgtgatgatgttgtcacccgcataggagctcatctgccactgcgggatggcggtgcaggccaccagacccacccagcccagcagggccatggagaagcccagcaactgcaggcccgaattggccatttccgccctcagaaaacactgggggcgccgggcgggagaccctacagtaaaacaaacgacacttggggggcagccccacaaaagaaaacttgaggtggagttttccggtcacccaaagagacaaaaagggtttgggccaggtgaatgcaaatcttgtcaccaaactacacacaaatcgacccctccagtgaagcgatggcctcgcggcacagggagtaggatacgccgggagggtggttccagacaaaattggtggtccccgaaggccaggcggttccctccgggcgctctcggcgacc

SEQ ID NO: 929 - DNA, 69 bp, Homo sapiens
ctcctcgaccaccagcttgcactggcagtagttgagcagcagcggcgtgatctgcttgtccagctggat

SEQ ID NO: 930 - DNA, 544 bp, Homo sapiens
gctttctccttcttatagacgttccggacgggcatgaccggtccggtcagctgggtggccagtttcagttcttcagcagaactgtctcccttcttgggggccgagggcttcctggggaagaggatgagtttggagcggtactccttcagccgctgcacgttggcctgcagggactccgtggacttgttccgcctcctcggatccacagaaatgccgatggtccgggccaccttcttgtgaatgccggccaccctgagctcctccaggctgaagccgcggccggcgcgcaccttcgtgtggtaccgaaccgtggggcagcgcacgatgggccggatgggacccgacgcggggcgcggggcgatgcggcgcgccttggcttgccgggccttacgtctgcggatcttacgggccggctggttgaaccacgtggccacgcgccgctgccagtccttgtggaagtggggcttcaagaccatgccattccggctgggcgccatggctgcctacggccctgcggctcctgcggtcgacgcggccgcgaatt

SEQ ID NO: 931 - DNA, 596 bp, Homo sapiens
  misc_feature 538: n = A,T,C or G
gttgctgcagtggcttgggcgtcaggaggctcactgagggggccacatgaccccagccagtgacagtgcagtggaggccgttggggaaggaggcgttggctgcagggaggcagatgggccggatgtagcgggagaaggtgatgggtctgctgagttggaggagtgcaatgtcgccctgggagccctcctggaggtagctggggtgggggatgatgtccttcagggtgctgaccttggcgtcctcggagtaggagtctagctggtgggcccccagcttgacctcataggcttccttgtggtgctcgctggggaagcagtgagcagctgacagcacccactgctcagacacgagagagccaccacacacatggacgccttcataggtgatgctgacctgccagggccactgaccggcgactgcactgctgccacctgtgatgcgtgcttggggggccacaccgcagggagcttctgccccttccgctcctgtccccgaccggagtaatccaagatagagcagaatggccacagcccccanctgcccaggccccaggacccccttctgggccatggcccaggacaagggcccctggggc

SEQ ID NO: 932 - DNA, 153 bp, Homo sapiens
tctgtgctggggtctgggctccgtggagagatgtgtaggggtaatgagaaattgatcagcaatgagaggtggactctgagccacctccctgaccctgaatcattcaagcgaggagcagaggagctcttgactgggggacggggatgtgaggat

SEQ ID NO: 933 - DNA, 112 bp, Homo sapiens
tcaaacttgccattgttaaaagcagccacattttggacctgcagtttcctcagaaatagttaggattctgtgtcgacgcggccgcgaattccaccacactggactagtggat

SEQ ID NO: 934 - DNA, 74 bp, Homo sapiens
gtggccatcgagtccccatcctggtcggccacccggaaacgccgctcgtcccgaggtcgacgcggccgcgaatt

SEQ ID NO: 935 - DNA, 380 bp, Homo sapiens
gcggccgccatcttggtccttttccaccattttcagcccctccagggcttggaggacccggcgggccacactcttggagcctcggctgaagtggctgggcatgacgccgtttctctgacgtcccccatagatcttggtcatggagccaaccccagcgccaccccggaggtacaggtgccgcgctgtggaagcagctcgcgtgtagaaccagttctcatcgtagggagcaagctctttgtgcttggccagcttgacggtatccacccattcggggactttcagcttcccggactttttgaggaaggctgccagagctctgacgaactcctgctggttcacgtcttttacagtaactccaggcatcgtgcggcctccgcgcg

SEQ ID NO: 936 - DNA, 155 bp, Homo sapiens
ctggcgctttgaggatggtgtcctggaccctgattacccccgaaatatctctgacggcttcgatggcatcccggacaacgtggatgcagccttggccctccctgcccatagctacagtggccgggagcgggtctacttcttcaaggggaaacagt

SEQ ID NO: 937 - DNA, 213 bp, Homo sapiens
gaggcggagaggatcatgtccgggaactgcggggtagtagcgatctgggttacccagccgttgtggcccttgagggtgccacgaagggtcatctgctcagtcatggcggcggcgagagcgtgtgtcgctgcagcgacgaggatggcactggatggcttagagaaactagcaccacaacctctcctgccgccgccgtcgacgcggccgcgaatt

SEQ ID NO: 938 - DNA, 261 bp, Homo sapiens; identical to SEQ ID NO: 911

SEQ ID NO: 939 - DNA, 228 bp, Homo sapiens
gctcaggctccaaagccagcaggaaagaggtagctcgggacgtggagccgccgcccaggtgcgccaggaccacctcggccgtcaccttagccaggtggctgcttaggtccactgtgcgcttcacgtcctcattgatcagcggcggtgcctcggaggaggcgctgcccggcgccggggcccaagtcccaagcaacaggagcagaaacaagccggcggctggcgcgtcga

SEQ ID NO: 940 - DNA, 97 bp, Homo sapiens
tccttcaagtatgcctgggtgctggacaagctgaaggcggagcgtgagcgcggcatcaccatcgacatctccctctggaagttcgagaccaccaagt

SEQ ID NO: 941 - DNA, 200 bp, Homo sapiens
ggacccaggggcacaggctcccagatgatagcccctctctgaatgagcacccaggcaacacagtccggggctgtgtgtagcaaacctgtcagcagctgcctcctgggacaaccacccccttacatgctatctatctaccagacaaatgaaagctcttcttaccccatctcccaggcaccccccagcaagggctctgaatt

SEQ ID NO: 942 - DNA, 209 bp, Homo sapiens
gaggcggagaggatcatgtccgggaactgcggggtagtagcgatctgggttacccagccgttgtggcccttgagggtgccacgaagggtcatctgctcagtcatggcggcggcgagagcgtgtgtcgctgcagcgacgaggatggcactggatggcttagagaaactagcaccacaacctctcctgccgcgtcgacgcggccgcgaatt

SEQ ID NO: 943 - DNA, 130 bp, Homo sapiens
gtaaggagcccaagaaaaagtgatgccgcctggcagactcgccatcccccaacgacacagggcaggacagcagaggacgtgctgggattaaacacattccccctcaaaaaaaaaaaaaaaaaaaaaaaaa

SEQ ID NO: 944 - DNA, 563 bp, Homo sapiens
gacagtcccagtactctttgctcagctttcggggccggcctcgtttccgcttcccgtgcttgggatcccccttcttgcagtcacgaaaaccatcgctggggaagagcttgccatcagtgggatccaggtccacgtcacttccaccggagtctgaggagtgggagctccgagaagcaccagtccctgcggtggagacgtcagagctgccgggggagggggctcctgcgccacagctgccggggtggtaggggctggcttgctgaccgtcgtccagcagctcctgggcaaaggggctgccctggtcaaagggccctgggtctagggcctcctggaaggccatgccatccttctccagcagctcaatgatccaactgagctcatcagaagagctggaagtgaggtctcgcagctgggcatggagttggtcccccagaggcccaaagaccagacgcagctcctcaagggcacaattgcagagggtggcgccatccatgtcacatcgtgagaagtcaatggcgcttgcgtcgtacttgttcttctccacttggtagctgatccagtcc

SEQ ID NO: 945 - DNA, 637 bp, Homo sapiens
  misc_feature 629: n = A,T,C or G
gctgagccccttactgctcctcccaccaatgggctccctcacacccaggacaggactaagagggagctggcggagaatggaggtgtcctgcagctggtgggcccagaggagaagatgggcctcccgggctcagactcacagaaagagctggcctgaccaccaggcacctcactggcactgctgacccatcccagaaacacaatctcagggacccgagcagctccaaggacgagaggatacagcagacacaacctaatagagagggcgcctgcagccttaacctccacggccttcgatacttatgcaagcctggtgttgctcctgtcctcagagtcatcctgcgctcatgccttttcccgaatgggttcacctctggcagttgccgcttcagtcttggccttagcctcatcttgaagtgggtagctggcgggagagggtggctgcgccccctgctggccctgaggctgcagagttgggagcaggacacctcacctgagtttcattttttttcatgtccaaaccatgcacatactatagtccagaatcaaagcacttttgaaaagtggctgcatggccatcctccagggcccaggaagttgcattccaagggcctgtttacatggcagcanaatccatc

SEQ ID NO: 946 - DNA, 306 bp, Homo sapiens
ggcgcgggctcctctcccctcggctgcccggatgcggagcaagcggctcccggggaagctggcgcgtcggccggctaccgcggcgagcacttaggaaggcgcggggtggccagttcacagctgcccgctccaagtggggggaggcgaattggagaggaggaggaggggaggaaaaagagcaaaagtgggggcgcttgcaccccttctcttctcctcctgcaaagaaaagtttccggggttgaaactggcgagtctccgcgccactgaagtttccagtcagtttcgaggtcgacgcggccgcgaatt

SEQ ID NO: 947 - DNA, 71 bp, Homo sapiens
ggtccagagctcccaggtttccaggttgcagtccctccagtcccagagctcccagggtttcggtttccagt

SEQ ID NO: 948 - DNA, 575 bp, Homo sapiens
  misc_feature 264, 344: n = A,T,C or G
gcggccgccctttttttttttttttgtcagcaaaaatctttttaataagagagtaggatccagggttagtttttgtagcctcggctggcccgtcggcctctggcacgctcgaacttccggcccttggagcggacgtagggtttggtgtggctgtgcggggttcctggggccttgccgaaatgccggtacacctctcggcccttgcgaggaccggagagcaggacagtgccacagcccttaggggagtccagggccagctggtcnaaagtgaggatcttgccccctgccctgaggatgcggctgcgggcccggctggtcacgcgcagtgcacataccttcagttngggtacctcctgaacccgcacatcatcagttatggtccccacaaccacggccgtcttgttttcccggccaggaagcttcatcttccggatcatccgggaaagggacagaggcggccggttggtgcgactcataaacaacctcttcaacacaacctggttgaatgtggagttggttcttctggccagaaacctgtataacttgaccaacagcctcaggtagatatcctggct

SEQ ID NO: 949 - DNA, 294 bp, Homo sapiens
ggggtttccacgtagcccacaatgcccacaaccaccatgggtggtgtctctacaatggtcacagcctccaccacctccttcttgttcaccttggatcccggcctgtcgacttcccgcacgatgtgagtcatgccagccttgtatcccaggaaggctgtgaggtggaccggcttggacgggtcatccttagggaagctcttcaccttcccacgatgcctgctgctgcgcttccgaggcaggaagccgagggacccatgtctgggagcggagaactttctgtgagacatcacgcca

SEQ ID NO: 950 - DNA, 693 bp, Homo sapiens
  misc_feature 556, 676: n = A,T,C or G
ggcccccaattccagctgccacaccacccacggtgactgcattagttcggatgtcatacaaaagctgattgaagcaaccctctactttttggtcgtgagccttttgcttggtgcaggtttcattggctgtgttggtgacgttgtcattgcaacagaatgggggaaaggcactgttctctttgaagtagggtgagtcctcaaaatccgtatagttggtgaagccacagcacttgagccctttcatggtggtgttccacacttgagtgaagtcttcctgggaaccataatctttcttgatggcaggcactaccagcaacgtcaggaagtgctcagccattgtggtgtacaccaaggcgaccacagcagctgcaacctcagcaatgaagatgaggaggaggatgaagaagaacgtcacgagggcacacttgctctcagtcttagcaccatagcagcccaggaaaccaagagcaaagaccacaacgccggctgcgatgaggaagtagcccacgttgacaaactgcatggcactggacgacagtggcccgaagatcttcanaaaggatgccccatcgattgacacccagatgcccactgccaacagggctgcaccacacagaaagatgagcaaattgaagaggatcatcatggtcttaatgaagctgaagcactgcatggnggctcctgttcagggct

SEQ ID NO: 951 - DNA, 607 bp, Homo sapiens
gtggcctgcaaggccgcggacagggcgagcaccgagtcgtacattttgcagctcatcatccccgtgctctgcgtgacgcagtccatccacagccccttgtacatggcctgggccgtgatgatgttgtcacccgcataggagctcatctgccactgcgggatggcggtgcaggccaccagacccacccagcccagcagggccatggagaagcccagcaactgcaggcccgaattggccatttccgccctcagaaaacactgggggcgccgggcgggagaccctacagtaaaacaaacgacacttggggggcagccccacaaaagaaaacttgaggtggagttttccggtcacccaaagagacaaaaagggtttgggccaggtgaatgcaaatcttgtcaccaaactacacacaaatcgacccctccagtgaagcgatggcctcgcggcacagggagtaggatacgccgggagggtggttccagacaaaattggtggtccccgaaggccaggcggttccctccgggcgctctcggcgaccctaggcaaacaaaaggtggaggggccgtctgggcgcgtttctgagcgccggcaagtcccaaagtatcct

SEQ ID NO: 952 - DNA, 372 bp, Homo sapiens
ggatgaggtcaacccgaaggggtttcttgagaagcagtgacttcttctggactttggttctcttctttgtcagccctttttccttggagccagtgtccacgaagaagagtttttcatttggggcctctgacaacaagccaccgctcgtgcgctcctgtagccgcacgtcttccaggaactggtcaacctccagccccagcggctcctgagcaagccgccgccagccccgcttcttatttcttgggcctcgccgccgccgcctcagcgctgggtccaccgaagtgggccgcagccccaggaaaccagaatcggcatcgcttttcgagctgcgcttcccaccaacgccactgcctgtcgacgcggccgcgaatt

SEQ ID NO: 953 - DNA, 275 bp, Homo sapiens
gccatctgctgttttttctcagcaccttccgtcttttgttcaatacttgagacgaccctccaagatgacctacgggctcctacaacatttttataagcaactgagagaagattcctctcctcattggataattcagctccttgctcagttacagacttcatgcaggctgccatgtcatcatatcgctcagcctgctcggccagtttggccttctgaaccagctcatttttatccatgactggatgttctgtgtccggtcgacgcggccgcgaatt

SEQ ID NO: 954 - DNA, 189 bp, Homo sapiens
ggctcccacttccctgcttcgatggagaaggcgaggtggtccagcaggtgccgtaggtccctgacccagctgaccaccaccctgggccagcttctgacagtcccacctcccagttgctggaggggtagtggcctcacagacggccctcctctagatgcagtgggcccagagtcgacgcggccgcgaatt

SEQ ID NO: 955 - DNA, 189 bp, Homo sapiens
gaggcggagaggatcatgtccgggaactgcggggtagtagcgatctgggttacccagccgttgtggcccttgagggtgccacgaagggtcatctgctcagtcatggcggcggcgagagcgtgtgtcgctgcagcgacgaggatggcactggatggcttagagaaactagcgtcgacgcggccgcgaatt

SEQ ID NO: 956 - DNA, 216 bp, Homo sapiens
gcggccgcacgtgtaggcaaagaagcctgtgtccggcctccagaccatgttggcccgcccattcccgctgtaaccgacgacagccttcagacgcagccacccaccgctggcgggaggcgggcaagtgcccttggcagagtgggggctgcagctgaccctggcaggcgtgaaggccttgcaggaagccaggtaggtggtgcgtggggcccccgaatt

SEQ ID NO: 957 - DNA, 62 bp, Homo sapiens
ccagtgggaggctcccaccctggtagatgaacagcccctggagaactacctggatatggagt

SEQ ID NO: 958 - DNA, 199 bp, Homo sapiens
ggattcggtcatattggaattgctgttcctgatgtatacagtgcttgtaaaaggtttgaagaactgggagtcaaatttgtgaagaaacctgatgatggtaaaatgaaaggcctggcatttattcaagatcctgatggctactggattgaaattttgaatcctaacaaaatggcaaccttaatgtagtgctgtgagaatt

SEQ ID NO: 959 - DNA, 212 bp, Homo sapiens
gaggcggagaggatcatgtccgggaactgcggggtagtagcgatctgggttacccagccgttgtggcccttgagggtgccacgaagggtcatctgctcagtcatggcggcggcgagagcgtgtgtcgctgcagcgacgaggatggcactggatggcttagagaaactagcaccacaacctctcctgccgccgcgtcgacgcggccgcgaatt

SEQ ID NO: 960 - DNA, 177 bp, Homo sapiens
  misc_feature 79: n = A,T,C or G
gacattttatgacctctcccaataggggcagaggtgagcacccctggtgaaaagttaagactcagtgagtataaatacnccaagaagagctgtggcttctttcactggtgtcctcagaaaggctgtgagcagtgttggtggcatacctgtcacagcatctagcaaagcacctgaatt

SEQ ID NO: 961 - DNA, 490 bp, Homo sapiens
  misc_feature 203, 296: n = A,T,C or G
gggcgtcctggtgcttaccacctggaaactggtgaggtggtgggagaactcctggtggaccctagtggaagccttccagtaatttcttgaagctgagcgctcaggtgagtagggcgacatctggtggccggttgttgaaggtcattgcagagaggaaggaagccgaggaggggagcctgcagtgagggcgtcctggggttctncggttctcaccacccttgggccacgccgtctagtccacacctgaggagttggtcaggtagaaggggcggatgaccgtgcggaagccgttgaantgccctgccgggcaggggaaggaggaggtgctcttcgagctgttggtgtccagggcactgggaatcgcagccttccagccctcgaaatcggtgacgtctgccacgaagagcccttcgcagagcatcagggctttgttttcgtaggcaatggtgcgatctgagccgccagacttggtgaggcccaggacagggag

SEQ ID NO: 962 - DNA, 159 bp, Homo sapiens
  misc_feature 53, 80, 82, 90: n = A,T,C or G
gggtcggcccgggtggttgcggccacagcgcagcggcggagagcggcgcccancatgacggcgatggcggcgcgcgggcngnggacaganagaagccggtgtaagctcgcgggttgctccggagcgggcgggggccggacgtcgacgcggccgcgaatt

SEQ ID NO: 963 - DNA, 217 bp, Homo sapiens
  misc_feature 79, 80: n = A,T,C or G
gggtagagaaccctgcggctgcgctttcggtgcccgcgagaggcgctggggcgcccggcaggggccgctgcgggctccnngagagggtcgaaggtgaagatctcaggaccggagccccgccggggtcccgggatggtggagggggccggggtcggggcctgcaggatggtcatggtcgggtggcagctgcgagagtgacacatggtgagccgagcgt

SEQ ID NO: 964 - DNA, 540 bp, Homo sapiens
  misc_feature 484: n = A,T,C or G
gtggcctgcaaggccgcggacagggcgagcaccgagtcgtacattttgcagctcatcatccccgtgctctgcgtgacgcagtccatccacagccccttgtacatggcctgggccgtgatgatgttgtcacccgcataggagctcatctgccactgcgggatggcggtgcaggccaccagacccacccagcccagcagggccatggagaagcccagcaactgcaggcccgaattggccatttccgccctcagaaaacactgggggcgccgggcgggagaccctacagtaaaacaaacgacacttggggggcagccccacaaaagaaaacttgaggtggagttttccggtcacccaaagagacaaaaagggtttgggccaggtgaatgcaaatcttgtcaccaaactacacacaaatcgacccctccagtgaagcgatggcctcgcggcacagggagtaggatacgccgggagggtggttccaganaaaattggtggtccccgaaggccaggcggttccctccgggcgctctcggcgaccct

SEQ ID NO: 965 - DNA, 321 bp, Homo sapiens
  misc_feature 299, 307: n = A,T,C or G
gcccacagtggcttgtttccgcagtgcgcggccgtcagcacccaactctggtccaccaggacacccgcgcagtggaacgagaggccgttgaagagcgagacctgccagggctgcgagccgcgcgcgcacggggcgccataggcttcggggtccaagcgcgtgtcgttttgggggagcagcgccgcctctgcggcccagagttgcgccatcagcagcggcagcagcttcgccagagcccgggcgccagaggcggcggagaggtggaggtgcggagctctcatggccaggatctgggagtngccgatangaaggagggagggg

SEQ ID NO: 966 - DNA, 642 bp, Homo sapiens
  misc_feature 238: n = A,T,C or G
ggtggacaccaccctcaagagcctgagccagcagatcgagaacatccggagcccagagggcagccgcaagaaccccgcccgcacctgccgtgacctcaagatgtgccactctgactggaagagtggagagtactggattgaccccaaccaaggctgcaacctggatgccatcaaagtcttctgcaacatggagactggtgagacctgcgtgtaccccactcagcccagtgtggcccanaagaactggtacatcagcaagaaccccaaggacaagaggcatgtctggttcggcgagagcatgaccgatggattccagttcgagtatggcggccagggctccgaccctgccgatgtggccatccagctgaccttcctgcgcctgatgtccaccgaggcctcccagaacatcacctaccactgcaagaacagcgtggcctacatggaccagcagactggcaacctcaagaaggccctgctcctccagggctccaacgagatcgagatccgcgccgagggcaacagccgcttcacctacagcgtcactgtcgatggctgcacgagtcacaccggagcctggggcaagacagtgattgaatacaaaaccaccaagacctcccgcctgcccatcatcgatgtggcccc

SEQ ID NO: 967 - DNA, 650 bp, Homo sapiens
  misc_feature 571: n = A,T,C or G
ggtggacaccaccctcaagagcctgagccagcagatcgagaacatccggagcccagagggcagccgcaagaaccccgcccgcacctgccgtgacctcaagatgtgccactctgactggaagagtggagagtactggattgaccccaaccaaggctgcaacctggatgccatcaaagtcttctgcaacatggagactggtgagacctgcgtgtaccccactcagcccagtgtggcccagaagaactggtacatcagcaagaaccccaaggacaagaggcatgtctggttcggcgagagcatgaccgatggattccagttcgagtatggcggccagggctccgaccctgccgatgtggccatccagctgaccttcctgcgcctgatgtccaccgaggcctcccagaacatcacctaccactgcaagaacagcgtggcctacatggaccagcagactggcaacctcaagaaggccctgctcctccagggctccaacgagatcgagatccgcgccgagggcaacagccgcttcacctacagcgtcactgtcgatggctgcacgagtcacaccggnagcctggggcaagacagtgattgaatacaaaaccaccaagaccttccgcctgcccatcatcgatgtggcccccttggac

SEQ ID NO: 968 - DNA, 629 bp, Homo sapiens
  misc_feature 571: n = A,T,C or G
ggtggacaccaccctcaagagcctgagccagcagatcgagaacatccggagcccagagggcagccgcaagaaccccgcccgcacctgccgtgacctcaagatgtgccactctgactggaagagtggagagtactggattgaccccaaccaaggctgcaacctggatgccatcaaagtcttctgcaacatggagactggtgagacctgcgtgtaccccactcagcccagtgtggcccagaagaactggtacatcagcaagaaccccaaggacaagaggcatgtctggttcggcgagagcatgaccgatggattccagttcgagtatggcggccagggctccgaccctgccgatgtggccatccagctgaccttcctgcgcctgatgtccaccgaggcctcccagaacatcacctaccactgcaagaacagcgtggcctacatggaccagcagactggcaacctcaagaaggccctgctcctccagggctccaacgagatcgagatccgcgccgagggcaacagccgcttcacctacagcgtcactgtcgatggctgcacgagtcacaccggnagcctggggcaagacagtgattgaatacaaaaccaccaagacctcccgcctgcccatc

SEQ ID NO: 969 - DNA, 222 bp, Homo sapiens
gaatgtcaggggtgttgggggctttggctgggtcctgggtcttcgtgtagagacctggaggcgcttggttcttggggttctccaggattccagcctcgtagctgatgtgcatgaggttctcatccatgctccacgggttcttgggagtgaccgggatgggaatcccgtgttgctttgcgtactccatcaggtcattgcggcccttgaaccggttgtagaatt

SEQ ID NO: 970 - DNA, 79 bp, Homo sapiens
gcaggggccgcctggccttgctccgctccacgaggaggccgccaaccgcagggccgcgacacggacgggaagcaacgga

SEQ ID NO: 971 - DNA, 111 bp, Homo sapiens
ggaaaatgcatctaccccacccaaccagcagcctcactttaggctgccttgtcccgggcgccccattcgtcagccccacgcctcctccaggatccgggcccagctcgaatt

SEQ ID NO: 972 - DNA, 609 bp, Homo sapiens
  misc_feature 571: n = A,T,C or G
ggtggacaccaccctcaagagcctgagccagcagatcgagaacatccggagcccagagggcagccgcaagaaccccgcccgcacctgccgtgacctcaagatgtgccactctgactggaagagtggagagtactggattgaccccaaccaaggctgcaacctggatgccatcaaagtcttctgcaacatggagactggtgagacctgcgtgtaccccactcagcccagtgtggcccagaagaactggtacatcagcaagaaccccaaggacaagaggcatgtctggttcggcgagagcatgaccgatggattccagttcgagtatggcggccagggctccgaccctgccgatgtggccatccagctgaccttcctgcgcctgatgtccaccgaggcctcccagaacatcacctaccactgcaagaacagcgtggcctacatggaccagcagactggcaacctcaagaaggccctgctcctccagggctccaacgagatcgagatccgcgccgagggcaacagccgcttcacctacagcgtcactgtcgatggctgcacgagtcacaccggnagcctggggcaagacagtgattgaatacaaaaccacca

SEQ ID NO: 973 - DNA, 311 bp, Homo sapiens
ggggtttccacgtagcccacaatgcccacaaccaccatgggtggtgtctctacaatggtcacagcctccaccacctccttcttgttcaccttggatcccggcctgtcgacttcccgcacgatgtgagtcatgccagccttgtatcccaggaaggctgtgaggtggaccggcttggacgggtcatccttagggaagctcttcaccttcccacgatgcctgctgctgcgcttccgaggcaggaagccgagggacccatgtctgggagcggagaactttctgtgagacatcacgcgtcgacgcggccgcgaatt

SEQ ID NO: 974 - DNA, 180 bp, Homo sapiens
  misc_feature 114, 127, 133, 138, 162: n = A,T,C or G
gaggcggagaggatcatgtccgggaactgcggggtagtagcgatctgggttacccagccgttgtggcccttgagggtgccacgaagggtcatctgctcagtcatggcggcggcnagagcgtgtgtcnctgcancgacnaggatggcactggatggcttaganaaactagcaccacgtcga

SEQ ID NO: 975 - DNA, 187 bp, Homo sapiens
gcaccagccccggggactatgtgctcagcgtctcagagaactcgcgcgtctcccactacatcatcaacagcagcggcccgcgcccgccggtgccaccgtcgcccgcccagcctccgcccggggtgagcccctccagactccgaataggagatcaagagtttgattcattgcctgctttactggaatt

SEQ ID NO: 976 - DNA, 59 bp, Homo sapiens
ctggttccgctgcatggacctggacggggacggcgccctgtccatgttcgagctcgagt

SEQ ID NO: 977 - DNA, 66 bp, Homo sapiens
ggtccagagctcccaggtttccaggttgcagtccctccagtcccagagctcccagggtttcggttt

SEQ ID NO: 978 - DNA, 114 bp, Homo sapiens
ggagctgatgcgggaaccgggcccactcgtgtaggagcggctgctgaaggcccgggggccagaggtggacaccttgtaggacttctgggtcacccgtcgacgcggccgcgaatt

SEQ ID NO: 979 - DNA, 177 bp, Homo sapiens; identical to SEQ ID NO: 922

SEQ ID NO: 980 - DNA, 188 bp, Homo sapiens
  misc_feature 41: n = A,T,C or G
ggagctgatgcgggaaccgggcccactcgtgtaggagcggntgctgaaggcccgggggccagaggtggacaccttgtaggacttctgggtcaccctgatggacatggtagaggctggagtggaggcaggcgggccgaaccaggcggagatcctagaaggagcggagaaggtcgacgcggccgcgaatt

SEQ ID NO: 981 - DNA, 184 bp, Homo sapiens
  misc_feature 91: n = A,T,C or G
gggccccaggaggccgggtgggcacaggccatggcgagggtggggcacaagagccccagaccccggcggctttgcactgatgggctgcggntgggcacaggccatagtgaggggggcatgagagccccagaccgggcggctttgcactgatgagctgcagggcaggtcgacgcggccgcgaatt

SEQ ID NO: 982 - DNA, 98 bp, Homo sapiens
tccactagtccagtgtggtggaattcgcggccgcgtcgaccgaaccctgaaccctacggtcccgacccgcgggcgaggccgggtacctgggctgggat

SEQ ID NO: 983 - DNA, 425 bp, Homo sapiens
  misc_feature 165: n = A,T,C or G
gccggatatggtcctgccggtggcagcctatgggctgatcctgatggccatgctgtggcgcggcctggcccagggcgggagtgccggctggggcgcgctgctcttcacgctctctgatggcgtgctggcctgggacaccttcgcccagcccctgccccatgcccncctggtgatcatgaccacctactatgctgcccagctcctcatcacactgtcagccctcaggagcccggtgcccaagactgactgactagggagcttgaagggccggtgttcaggccctctcctcctgcaaggacctgggcctcccagcccagcccagcctgagaaataccctcagcagcgaagcttcctgacgcctgtctgcaggcgccgctgccgccgtcgcttctggctgaagacgtttgaggacgatttgcggaatt

SEQ ID NO: 984 - DNA, 148 bp, Homo sapiens
  misc_feature 5: n = A,T,C or G
tcctnagccagggagacagggaccaggcagcacaggcctgccagcaggaggatgccccacgagacagaagacggcattgtcgattcactgtcccaggtcagtggtgggtcgacgcggccgcgaattccaccacactggactagtggat

SEQ ID NO: 985 - DNA, 461 bp, Homo sapiens
  misc_feature 238, 255, 403, 448, 451: n = A,T,C or G
ggtggacaccaccctcaagagcctgagccagcagatcgagaacatccggagcccagagggcagccgcaagaaccccgcccgcacctgccgtgacctcaagatgtgccactctgactggaagagtggagagtactggattgaccccaaccaaggctgcaacctggatgccatcaaagtcttctgcaacatggagactggtgagacctgcgtgtaccccactcagcccagtgtggcccanaagaactggtacatcancaagaaccccaaggacaagaggcatgtctggttcggcgagagcatgaccgatggattccagttcgagtatggcggccagggctccgaccctgccgatgtggccatccagctgaccttcctgcgcctgatgtccaccgaggcctcccanaacatcacctaccactgcaagaacagcgtggcctacatggaccancanactggcaacc

SEQ ID NO: 986 - DNA, 138 bp, Homo sapiens
  misc_feature 45, 137: n = A,T,C or G
gagcggctgctgaaggcccgggggccagaggtggacaccttgtangacttctgggtcaccctgatggacatggtagaggcaggagtggaggcaggcgggccgaaccaggcggagatcctagaaggagcggaggtcgnc

SEQ ID NO: 987 - DNA, 555 bp, Homo sapiens
  misc_feature 423: n = A,T,C or G
gcggccgcccttttttttttttttttttagtggtataactatatttattgtgcctgagaggcaaggtgagggaaaaatctcaacagaagcaagtttggggaaaatctggagtccccagtaaaaagcaggaaggtctctgctgtactcatcacagaatgggagagagggctctcaatagatcattccctttgtttctcccctgggcttcttgagcttctcgaagttcttcaggatgatgtcatataacacagcataagcattgcggatctccatgaccatcagccggatgtcccggtactctgcctcatccagctcgtgcaccagctgccgataatcacccacatggggctgcttggctgctttagtcactgcatcaccacgctcagagaaatacttagagatttgagtgtggaagccttctancttggtgtggaggctggtcatcagctcaaacaccttctcctggacagccactccaaaattgttaccatcctcaatccgaggtatctgcagctgcaaccaggtggtgaccaggttgagctgctcaatgacatc

SEQ ID NO: 988 - DNA, 318 bp, Homo sapiens
gacggcgcgggcgacctacgaacagctttgaggaagccccgacagtggcggcgtccagtgcctccgagggcggcgaccgcggctccgcagcctctcccagccgctccgcccggttccggggagtcggtcgggacaaaatggcctcccctcccccctcagggcttctcggccgggacgctcccacgggcgagcaagcctgctctgccgtcgaggaggcgcagcgggcgtgaggacagtctctctcccgagcggaaactccctgctagcacgcggcgagggcagcgaagaaggacccctaagtcgacgagctcagttaca

SEQ ID NO: 989 - DNA, 177 bp, Homo sapiens; identical to SEQ ID NO: 922

SEQ ID NO: 990 - DNA, 144 bp, Homo sapiens
  misc_feature 11: n = A,T,C or G
gtgagcacccntggtgaaaagttaagactcagtgagtataaatacgccaagaagagctgtggcttctttcactggtgtcctcagaaaggctgtgagcagtgttggtggcatacctgtcacagcatctagcaaagcacctgaatt

SEQ ID NO: 991 - DNA, 659 bp, Homo sapiens
ggtggacaccaccctcaagagcctgagccagcagatcgagaacatccggagcccagagggcagccgcaagaaccccgcccgcacctgccgtgacctcaagatgtgccactctgactggaagagtggagagtactggattgaccccaaccaaggctgcaacctggatgccatcaaagtcttctgcaacatggagactggtgagacctgcgtgtaccccactcagcccagtgtggcccagaagaactggtacatcagcaagaaccccaaggacaagaggcatgtctggttcggcgagagcatgaccgatggattccagttcgagtatggcggccagggctccgaccctgccgatgtggccatccagctgaccttcctgcgcctgatgtccaccgaggcctcccagaacatcacctaccactgcaagaacagcgtggcctacatggaccagcagactggcaacctcaagaaggccctgctcctccagggctccaacgagatcgagatccgcgccgagggcaacagccgcttcacctacagcgtcactgtcgatggctgcacgagtcacaccggagcctggggcaagacagtgattgaatacaaaaccaccaagacctcccgcctgcccatcatcgatgtggcccccttggacgttggtgccc

SEQ ID NO: 992 - DNA, 226 bp, Homo sapiens
tccgctgcactgggtttgccggattcttgggcttcccacatactgcttcacattcaggaagtttatctccaacagccttatttatccactgcttcttatcatttaaggtgtatactccatctccttctgtgcgcagtttgtagtagttcttacactggtagcgaaccgagtgctccacatagccatgtgcaatctcggggggcttcgggcagccgtcatctgcgat

SEQ ID NO: 993 - DNA, 160 bp, Homo sapiens
  misc_feature 8, 9, 15, 37, 41, 85, 87: n = A,T,C or G
ctcgtgtnngagcgnctgctgaaggcccgggggccanaggnggacaccttgtacgacttctgggtcaccctgatggacatggtanangctggagtggaggcaggcgggccgaaccaggcggagatcctagaaggagcggaggtcgacgcggccgcgaatt

SEQ ID NO: 994 - DNA, 622 bp, Homo sapiens
  misc_feature 1, 9: n = A,T,C or G
nagcctganccagcagatcgagaacatccggagcccagagggcagccgcaagaaccccgcccgcacctgccgtgacctcaagatgtgccactctgactggaagagtggagagtactggattgaccccaaccaaggctgcaacctggatgccatcaaagtcttctgcaacatggagactggtgagacctgcgtgtaccccactcagcccagtgtggcccagaagaactggtacatcagcaagaaccccaaggacaagaggcatgtctggttcggcgagagcatgaccgatggattccagttcgagtatggcggccagggctccgaccctgccgatgtggccatccagctgaccttcctgcgcctgatgtccaccgaggcctcccagaacatcacctaccactgcaagaacagcgtggcctacatggaccagcagactggcaacctcaagaaggccctgctcctccagggctccaacgagatcgagatccgcgccgagggcaacagccgcttcacctacagcgtcactgtcgatggctgcacgagtcacaccggagcctggggcaagacagtgattgaatacaaaaccaccaagacctcccgcctgcccatcatcgatgtggcc

SEQ ID NO: 995 - DNA, 158 bp, Homo sapiens
aataagattttgccagaggggaaggctcgattgtgctgttaataacttaataatgacaaaataatgaggtgtatatgctttacatgcaatgttatatagtgaattgttctgattcttaattgtaagtctggtttttttatctgtaagataattgtgtg

SEQ ID NO: 996 - DNA, 295 bp, Homo sapiens
cggccgcgtcgactctcggagcggagacggcaaatggcggacttcgacacctacgacgatcgggcctacagcagcttcggcggcggcagagggtcccgcggcagtgctggtggccatggttcccgtagccagaaggagttgcccacagagcccccctacacagcatacgtaggaaatctacctttcaatacggttcagggcgacatagatgctatctttaaggatctcagcataaggagtgtacggctagtcagagacaaagacacagataaatttaaaggattctgctatgtag

SEQ ID NO: 997 - DNA, 125 bp, Homo sapiens
cggccgccctttttttttttttttttaaggttttttggctgtaagtttattcaatgcaaaagaatcctctccaattttactgaggtggctgaccacgtccacgaccaaatccgcctctaaactgg

SEQ ID NO: 998 - DNA, 152 bp, Homo sapiens
gagctgatgcgggaaccgggcccactcgtgtaggagcggctgctgaaggcccgggggccagaggtggacaccttgtaggacttctgggtcaccctgatggacatggtagaggctggagtggaggcaggcgggccgaaccaggcggagatcct

SEQ ID NO: 999 - DNA, 119 bp, Homo sapiens
  misc_feature 23, 29, 54, 76, 77: n = A,T,C or G
taaagcaaccactaaaccacctncagcangagaaagcagcagagagctcttcanacagctcagactctgacagctnngaggatgatgaagctccttctaagccagctggtaccaccaag

SEQ ID NO: 1000 - DNA, 209 bp, Homo sapiens
  misc_feature 6, 7: n = A,T,C or G
ccctcnngaggcggagaggatcatgtccgggaactgcggggtagtagcgatctgggttacccagccgttgtggcccttgagggtgccacgaagggtcatctgctcagtcatggcggcggcgagagcgtgtgtcgctgcagcgacgaggatggcactggatggcttagagaaactagcaccacaacctctcctgcgtcgacgcggccgcg

SEQ ID NO: 1001 - DNA, 390 bp, Homo sapiens
gtggacaccaccctcaagagcctgagccagcagatcgagaacatccggagcccagagggcagccgcaagaaccccgcccgcacctgccgtgacctcaagatgtgccactctgactggaagagtggagagtactggattgaccccaaccaaggctgcaacctggatgccatcaaagtcttctgcaacatggagactggtgagacctgcgtgtaccccactcagcccagtgtggcccagaagaactggtacatcagcaagaaccccaaggacaagaggcatgtctggttcggcgagagcatgaccgatggattccagttcgagtatggcggccagggctccgaccctgccgatgtggccatccagctgaccttcctgcgcctgatgtccacc

SEQ ID NO: 1002 - DNA, 613 bp, Homo sapiens
gtggacaccaccctcaagagcctgagccagcagatcgagaacatccggagcccagagggcagccgcaagaaccccgcccgcacctgccgtgacctcaagatgtgccactctgactggaagagtggagagtactggattgaccccaaccaaggctgcaacctggatgccatcaaagtcttctgcaacatggagactggtgagacctgcgtgtaccccactcagcccagtgtggcccagaagaactggtacatcagcaagaaccccaaggacaagaggcatgtctggttcggcgagagcatgaccgatggattccagttcgagtatggcggccagggctccgaccctgccgatgtggccatccagctgaccttcctgcgcctgatgtccaccgaggcctcccagaacatcacctaccactgcaagaacagcgtggcctacatggaccagcagactggcaacctcaagaaggccctgctcctccagggctccaacgagatcgagatccgcgccgagggcaacagccgcttcacctacagcgtcactgtcgatggctgcacgagtcacaccggagcctggggcaagacagtgattgaatacaaaaccaccaagacct

SEQ ID NO: 1003 - DNA, 639 bp, Homo sapiens
gtggacaccaccctcaagagcctgagccagcagatcgagaacatccggagcccagagggcagccgcaagaaccccgcccgcacctgccgtgacctcaagatgtgccactctgactggaagagtggagagtactggattgaccccaaccaaggctgcaacctggatgccatcaaagtcttctgcaacatggagactggtgagacctgcgtgtaccccactcagcccagtgtggcccagaagaactggtacatcagcaagaaccccaaggacaagaggcatgtctggttcggcgagagcatgaccgatggattccagttcgagtatggcggccagggctccgaccctgccgatgtggccatccagctgaccttcctgcgcctgatgtccaccgaggcctcccagaacatcacctaccactgcaagaacagcgtggcctacatggaccagcagactggcaacctcaagaaggccctgctcctccagggctccaacgagatcgagatccgcgccgagggcaacagccgcttcacctacagcgtcactgtcgatggctgcacgagtcacaccggagcctggggcaagacagtgattgaatacaaaaccaccaagacctcccgcctgcccatcatcgatgtggcc

SEQ ID NO: 1004 - DNA, 85 bp, Homo sapiens
ccgttattcgtcgtggctcaagcccggccacgccgccccaagggctcctcccgacctcccggcctgccgctccggccactgcggg

SEQ ID NO: 1005 - DNA, 636 bp, Homo sapiens
gtggacaccaccctcaagagcctgagccagcagatcgagaacatccggagcccagagggcagccgcaagaaccccgcccgcacctgccgtgacctcaagatgtgccactctgactggaagagtggagagtactggattgaccccaaccaaggctgcaacctggatgccatcaaagtcttctgcaacatggagactggtgagacctgcgtgtaccccactcagcccagtgtggcccagaagaactggtacatcagcaagaaccccaaggacaagaggcatgtctggttcggcgagagcatgaccgatggattccagttcgagtatggcggccagggctccgaccctgccgatgtggccatccagctgaccttcctgcgcctgatgtccaccgaggcctcccagaacatcacctaccactgcaagaacagcgtggcctacatggaccagcagactggcaacctcaagaaggccctgctcctccagggctccaacgagatcgagatccgcgccgagggcaacagccgcttcacctacagcgtcactgtcgatggctgcacgagtcacaccggagcctggggcaagacagtgattgaatacaaaaccaccaagacctcccgcctgcccatcatcgatgtg

SEQ ID NO: 1006 - DNA, 629 bp, Homo sapiens
  misc_feature 468: n = A,T,C or G
gtggacaccaccctcaagagcctgagccagcagatcgagaacatccggagcccagagggcagccgcaagaaccccgcccgcacctgccgtgacctcaagatgtgccactctgactggaagagtggagagtactggattgaccccaaccaaggctgcaacctggatgccatcaaagtcttctgcaacatggagactggtgagacctgcgtgtaccccactcagcccagtgtggcccagaagaactggtacatcagcaagaaccccaaggacaagaggcatgtctggttcggcgagagcatgaccgatggattccagttcgagtatggcggccagggctccgaccctgccgatgtggccatccagctgaccttcctgcgcctgatgtccaccgaggcctcccagaacatcacctaccactgcaagaacagcgtggcctacatggaccagcagactggcaacctcaagaangccctgctcctccagggctccaacgagatcgagatccgcgccgagggcaacagccgcttcacctacagcgtcactgtcgatggctgcacgagtcacaccggagcctggggcaagacagtgattgaatacaaaaccaccaagacctcccgcctgcccatcat

SEQ ID NO: 1007 - DNA, 575 bp, Homo sapiens
  misc_feature 248, 372: n = A,T,C or G
gtggacaccaccctcaagagcctgagccagcagatcgagaacatccggagcccagagggcagccgcaagaaccccgcccgcacctgccgtgacctcaagatgtgccactctgactggaagagtggagagtactggattgaccccaaccaaggctgcaacctggatgccatcaaagtcttctgcaacatggagactggtgagacctgcgtgtaccccactcagcccagtgtggcccagaagaactggtncatcagcaagaaccccaaggacaagaggcatgtctggttcggcgagagcatgaccgatggattccagttcgagtatggcggccagggctccgaccctgccgatgtggccatccagctgaccttnctgcgcctgatgtccaccgaggcctcccagaacatcacctaccactgcaagaacagcgtggcctacatggaccagcagactggcaacctcaagaaggccctgctcctccagggctccaacgagatcgagatccgcgccgagggcaacagccgcttcacctacagcgtcactgtcgatggctgcacgagtcacaccggagcctg

SEQ ID NO: 1008 - DNA, 62 bp, Homo sapiens; identical to SEQ ID NO: 843

SEQ ID NO: 1009 - DNA, 180 bp, Homo sapiens
  misc_feature 154: n = A,T,C or G
gagctgatgcgggaaccgggcccactcgtgtaggagcggctgctgaaggcccgggggccagaggtggacaccttgtaggacttctgggtcaccctgatggacatggtagaggcaggagtggaggcaggcgggccgaaccaggcggagatcctanaaggagcggaggtcgacgcggccgcg

SEQ ID NO: 1010 - DNA, 169 bp, Homo sapiens
gaggcggcacaggtcacgcatggccagcacggcagccatggcgctgcgctcgctcatgtttctcgccaggtaggtctgggccaggttcttgagtttgaagctgctggccccgggcacacgctcccggatgagaggcagggcagccaggaagcccgagatggcctcctgg

SEQ ID NO: 1011 - DNA, 170 bp, Homo sapiens
  misc_feature 78, 79: n = A,T,C or G
gagctgatgcgggaaccgggcccactcgtgtaggagcggctgctgaaggcccgggggccagaggtggacaccttgtannacttctgggtcaccctgatggacatggtagaggctggagtggaggcaggcgggccgaaccaggcggagatcctagaaggagcggaggtcga

SEQ ID NO: 1012 - DNA, 344 bp, Homo sapiens
  misc_feature 231, 235, 238, 245, 246, 251, 255, 263, 264, 270, 276, 302,313, 316, 317, 325: n = A,T,C or G
gtggacaccaccctcaagagcctgagccagcagatcgagaacatccggagcccagagggcagccgcaagaaccccgcccgcacctgccgtgacctcaagatgtgccactctgactggaagagtggagagtactggattgaccccaaccaaggctgcaacctggatgccatcaaagtcttctgcaacatggagactggtgagacctgcgtgtaccccactcagcccagtggnccanaanaactggnncatcngcangaaccccnnggacangaggcntgtctggttcggcgagagcatgaccnatggattccanttnnagtatggnggccagggctccgaccctg

SEQ ID NO: 1013 - DNA, 157 bp, Homo sapiens
  misc_feature 21, 22, 127, 136, 137: n = A,T,C or G
atagaaccccgcccgcacctnncgtgacctcaagatgtgccactctgactggaagagtggagagtactggattgaccccaaccaaggctgcaacctggatgccatcaaagtcttctgcaacatgganactggtganncctgcgtgtaccccactcag

SEQ ID NO: 1014 - DNA, 621 bp, Homo sapiens
gtggacaccaccctcaagagcctgagccagcagatcgagaacatccggagcccagagggcagccgcaagaaccccgcccgcacctgccgtgacctcaagatgtgccactctgactggaagagtggagagtactggattgaccccaaccaaggctgcaacctggatgccatcaaagtcttctgcaacatggagactggtgagacctgcgtgtaccccactcagcccagtgtggcccagaagaactggtacatcagcaagaaccccaaggacaagaggcatgtctggttcggcgagagcatgaccgatggattccagttcgagtatggcggccagggctccgaccctgccgatgtggccatccagctgaccttcctgcgcctgatgtccaccgaggcctcccagaacatcacctaccactgcaagaacagcgtggcctacatggaccagcagactggcaacctcaagaaggccctgctcctccagggctccaacgagatcgagatccgcgccgagggcaacagccgcttcacctacagcgtcactgtcgatggctgcacgagtcacaccggagcctggggcaagacagtgattgaatacaaaaccaccaagacctcccgcctg

SEQ ID NO: 1015 - DNA, 104 bp, Homo sapiens
  misc_feature 91, 95: n = A,T,C or G
gtggacaccaccctcaagagcctgagccagcagatcgagaacatccggagcccagagggcagccgcaagaaccccgcccgcacctgccgtnctcnagatgtgcc

SEQ ID NO: 1016 - DNA, 101 bp, Homo sapiens
gctgaccaggcggaaagaggagctgcccatgaaggggggcaccctgggcgggatccctggggagcccgccgtggaccaccgagatgtggatgagctgctgg

SEQ ID NO: 1017 - DNA, 172 bp, Homo sapiens; identical to SEQ ID NO: 858

SEQ ID NO: 1018 - DNA, 637 bp, Homo sapiens
gtggacaccaccctcaagagcctgagccagcagatcgagaacatccggagcccagagggcagccgcaagaaccccgcccgcacctgccgtgacctcaagatgtgccactctgactggaagagtggagagtactggattgaccccaaccaaggctgcaacctggatgccatcaaagtcttctgcaacatggagactggtgagacctgcgtgtaccccactcagcccagtgtggcccagaagaactggtacatcagcaagaaccccaaggacaagaggcatgtctggttcggcgagagcatgaccgatggattccagttcgagtatggcggccagggctccgaccctgccgatgtggccatccagctgaccttcctgcgcctgatgtccaccgaggcctcccagaacatcacctaccactgcaagaacagcgtggcctacatggaccagcagactggcaacctcaagaaggccctgctcctccagggctccaacgagatcgagatccgcgccgagggcaacagccgcttcacctacagcgtcactgtcgatggctgcacgagtcacaccggagcctggggcaagacagtgattgaatacaaaaccaccaagacctcccgcctgcccatcatcgatgtgg

SEQ ID NO: 1019 - DNA, 623 bp, Homo sapiens
gtggacaccaccctcaagagcctgagccagcagatcgagaacatccggagcccagagggcagccgcaagaaccccgcccgcacctgccgtgacctcaagatgtgccactctgactggaagagtggagagtactggattgaccccaaccaaggctgcaacctggatgccatcaaagtcttctgcaacatggagactggtgagacctgcgtgtaccccactcagcccagtgtggcccagaagaactggtacatcagcaagaaccccaaggacaagaggcatgtctggttcggcgagagcatgaccgatggattccagttcgagtatggcggccagggctccgaccctgccgatgtggccatccagctgaccttcctgcgcctgatgtccaccgaggcctcccagaacatcacctaccactgcaagaacagcgtggcctacatggaccagcagactggcaacctcaagaaggccctgctcctccagggctccaacgagatcgagatccgcgccgagggcaacagccgcttcacctacagcgtcactgtcgatggctgcacgagtcacaccggagcctggggcaagacagtgattgaatacaaaaccaccaagacctcccgcctgcc

SEQ ID NO: 1020 - DNA, 233 bp, Homo sapiens
ggtagagaaccctgcggctgcgctttcggtgcccgcgagaggcgctggggcgcccggcaggggccgctgcgggctccgggagagggtcgaaggtgaagatctcaggaccggagccccgccggggtcccgggatggtggagggggccggggtcggggcctgcaggatggtcatggtcgggtggcagctgcgagagtgacacatggtgagccgagcggaggtcgacgcggccgcg

SEQ ID NO: 1021 - DNA, 180 bp, Homo sapiens
gagctgatgcgggaaccgggcccactcgtgtaggagcggctgctgaaggcccgggggccagaggtggacaccttgtaggacttctgggtcaccctgatggacatggtagaggcaggagtggaggcaggcgggccgaaccaggcggagatcctagaaggagcggaggtcgacgcggccgcg

SEQ ID NO: 1022 - DNA, 636 bp, Homo sapiens; identical to SEQ ID NO: 1005

SEQ ID NO: 1023 - DNA, 162 bp, Homo sapiens
aggcggagaggatcatgtccgggaactgcggggtagtagcgatctgggttacccagccgttgtggcccttgagggtgccacgaagggtcatctgctcagtcatggcggcggcgagagcgtgtgtcgctgcagcgacgaggatggcacgtcgacgcggccgcg

SEQ ID NO: 1024 - DNA, 124 bp, Homo sapiens
tccactagtccagtgtggtggaattcgcggccgcgtcgacgccgagcaggaggcgccatcatgggagtggacatccgccataacaaggaccgaaaggttcggcgcaaggagcccaagagccagg

SEQ ID NO: 1025 - DNA, 635 bp, Homo sapiens
  misc_feature 618: n = A,T,C or G
gcccccaattccagctgccacaccacccacggtgactgcattagttcggatgtcatacaaaagctgattgaagcaaccctctactttttggtcgtgagccttttgcttggtgcaggtttcattggctgtgttggtgacgttgtcattgcaacagaatgggggaaaggcactgttctctttgaagtagggtgagtcctcaaaatccgtatagttggtgaagccacagcacttgagccctttcatggtggtgttccacacttgagtgaagtcttcctgggaaccataatctttcttgatggcaggcactaccagcaacgtcaggaagtgctcagccattgtggtgtacaccaaggcgaccacagcagctgcaacctcagcaatgaagatgaggaggaggatgaagaagaacgtcacgagggcacacttgctctcagtcttagcaccatagcagcccaggaaaccaagagcaaagaccacaacgccggctgcgatgaggaagtagcccacgttgacaaactgcatggcactggacgacagtggcccgaagatcttcagaaaggatgccccatcgattgacacccagatgcccactgccaacagggctgcaccacacagaangatgagcaaattgaaga

SEQ ID NO: 1026 - DNA, 355 bp, Homo sapiens
ccatctgctgttttttctcagcaccttccgtcttttgttcaatacttgagacgaccctccaagatgacctacgggctcctacaacatttttataagcaactgagagaagattcctctcctcattggataattcagctccttgctcagttacagacttcatgcaggctgccatgtcatcatatcgctcagcctgctcggccagtttggccttctgaaccagctcatttttatccatgactggatgttctgtgtccggagtgggtggtggcggcggacggacgggctcagcagtctctgggcggcggcggcggcagcagcggcgaggctgagactctgtcccgtcgacgcggccgcg

SEQ ID NO: 1027 - DNA, 148 bp, Homo sapiens
tgccaccctggtgcccatgactgtggccttggtgcccaggaggggccagagctggtgggtgctggctgttcttctccctctggccctgagcccctggctctggagctgcctgtaggggctgaagggccatcccactgccattctccgg

SEQ ID NO: 1028 - DNA, 479 bp, Homo sapiens
  misc_feature 439: n = A,T,C or G
ggcgtcctggtgcttaccacctggaaactggtgaggtggtgggagaactcctggtggaccctagtggaagccttccagtaatttcttgaagctgagcgctcaggtgagtagggcgacatctggtggccggttgttgaaggtcattgcagagaggaaggaagccgaggaggggagcctgcagtgagggcgtcctggggttctccggttctcaccacccttgggccacgccgtctagtccacacctgaggagttggtcaggtagaaggggcggatgaccgtgcggaagccgttgaagtgccctgccgggcaggggaaggaggaggtgctcttcgagctgttggtgtccagggcactgggaatcgcagccttccagccctcgaaatcggtgacgtctgccacgaagagcccttcgcagagcatcagggctttgttttcgtangcaatggtgcgatctgagccgccagacttggtgaggccca

SEQ ID NO: 1029 - DNA, 64 bp, Homo sapiens
  misc_feature 5, 6: n = A,T,C or G
gcgtnnatgtagttcttgagcacctcgggaatgggcccctcggtcacggctggcaccgcctggg

SEQ ID NO: 1030 - DNA, 531 bp, Homo sapiens
cctgtcagagtggcactggtagaagttccaggaaccctgaactgtaagggttcttcatcagtgccaacaggatgacatgaaatgatgtactcagaagtgtcctggaatggggcccatgagatggttgtctgagagagagcttcttgtcctacattcggcgggtatggtcttggcctatgccttatgggggtggccgttgtgggcggtgtggtccgcctaaaaccatgttcctcaaagatcatttgttgcccaacactgggttgctgaccagaagtgccaggaagctgaataccatttccagtgtcatacccagggtgggtgacgaaaggggtcttttgaactgtggaaggaacatccaagatctctggtccatgaagattggggtgtggaagggttaccagttggggaagctcgtctgtctttttccttccaatcaggggctcgctcttctgattattcttcagggcaatgacataaattgtatattcggttcccggttccaggccagtaatagtagcctctgtgacacca

SEQ ID NO: 1031 - DNA, 518 bp, Homo sapiens
  misc_feature 443: n = A,T,C or G
cctgggtggtggagcgaatgggccgattccaccggatcctggagcctggtttgaacatcctcatccctgtgttagaccggatccgatatgtgcagagtctcaaggaaattgtcatcaacgtgcctgagcagtcggctgtgactctcgacaatgtaactctgcaaatcgatggagtcctttacctgcgcatcatggacccttacaaggcaagctacggtgtggaggaccctgagtatgccgtcacccagctagctcaaacaaccatgagatcagagctcggcaaactctctctggacaaagtcttccgggaacgggagtccctgaatgccagcattgtggatgccatcaaccaagctgctgactgctggggtatccgctgcctccgttatgagatcaaggatatccatgtgccaccccgggtgaaagagtctatgcagatgcangtggaggcagagcggcggaaacgggccacagttctagagtctgaggggacccgagagtcggccatcaatgtggca

SEQ ID NO: 1032 - DNA, 116 bp, Homo sapiens
aaatatttatgtggaattaattaaaggtagttggctatatcgctatcatttcattcttttgacattatgtgaatattttactggaaaataagactaataaattgttaaaagttttt

SEQ ID NO: 1033 - DNA, 241 bp, Homo sapiens
caagggtcatgatggcaggagtaatcagaggtgttcttgtgttgtgataagggtggagaggttaaaggagccacttattagtaatgttgatagtagaatgatggctagggtgacttcatatgagattgtttgggctactgctcgcagtgcgccgatcagggcgtagtttgagtttgatgctcaccctgatcagaggattgagtaaacggctaggctagaggtggctagaataaataggagg

SEQ ID NO: 1034 - DNA, 234 bp, Homo sapiens
ccacagctgggcgcttcacccagtggtactttggtgcctactccattgtggcgggcgtgtttgtgtgcctgctggagtacccccgggggaagaggaagaagggctccaccatggagcgctggggacagaagcacatgaccgccgtggtgaagctgttcgggccctttaccaggaattactatgttcgggccgtcctgcatctcctgctctcggtgcccgccggcttcctgctgg

SEQ ID NO: 1035 - DNA, 434 bp, Homo sapiens
  misc_feature 39, 42, 48, 113, 135, 137, 151, 185, 219, 228, 250, 254,268, 271, 275, 307, 344, 355, 358, 369, 376, 404, 409, 416,427: n = A,T,C or G
gtacaagcttttttttttttttttttttttttttttttnggntacggnagcacttttatttttccttacacaatgacgtgttgctggggcctaatgttctcacataacagtanaaaaccaaaatttgttgtcatntnttcaaagaatcganaattgcgtacaaaaaaaaccttacataaattaanaatgaatacatttacaggcgtaaatgcaaaccgnttccaactnaaagcaagtaacagcccacggngttntggccaaagacatnagntaanaaaggaaactgggtcctacggcttggactttncaaccctgacagacccgcaagacaaaacaactggttnttgccagcctntanagaaatcccanaacactnagccctgacacgttaataccctgcacanatcanaggctgntggccacacanactcacc

SEQ ID NO: 1036 - DNA, 294 bp, Homo sapiens
aaagccatgggaacccagatcaccagatccggagcctgactctagcccctgagccacctgttgccctaacaccctgtctgactctctcccgctgcagcagccagtccctcctgcactccagcaactccagccatcagtcatcttccagatccttggaaagtccagccaactcttcctccagcctccacagccttggctcagtgtccctgtgtacaagacccagtgacttccaggctcccagaaaccccaccctaaccatgggccaacccagaacaccccactctccaccactgg

SEQ ID NO: 1037 - DNA, 547 bp, Homo sapiens
  misc_feature 55, 56, 64, 65, 258, 314, 513: n = A,T,C or G
aaagatatgaacagcttaattttccgtgtgattatctaattaaaaaagaaaaacnnaacaagcnnaatgttcaagttaaaaaaaaaacataccgggtgagcaatgcactaaaattatccacatgaaaacaaatggtctgtaatcttataaaccaacatagcatttcactgtcaacaatgtgaaaatttaatatcttctcaaacaggcataagatgaagaagtgctattttttaattgtaaaaggaacttatgtaatgntaaaattacattataatttttcattccgaattgacaaatgatttcaaaaacaaggnatcaaagtttgactgcaaatagtaatgcaatataatttcataaaaatccttcaatttctatttttttccttttctgtagttgacatatgaagaccacttcaatttctaaaaaagggaaccattccaattttccctccccaagaaaatgtctcacaattacaaagtagaaaaacagccgttcataaaatgcaaaaaaaanttctgattttatacatgaaataatttctagatca

SEQ ID NO: 1038 - DNA, 451 bp, Homo sapiens
ccactctgcccaggagctgccgaccatcaggacgcctgcagacatttacagagcctttgttgatgttgtgaatggagaatatgtccctcgcaaatccatcctgaagtctcgaagtagagagaatagtgtgtgtagcgacactagtgaaagcagtgctgctgaatttgatgataggcggggagttttgaggagtatcagctgcgaagaagccacttgcagtgacaccagtgagagcattttggaagaggaaccacaagaaaatcaaaagaaacttttgcccttatcagtaacacctgaggctttttctggaactgttatagaaaaagaatttgtatcaccttccttaacaccacccccagccattgctcatcccgcactacccactattccagaacgaaaggaagttctgttggaagcatctgaagaaactggaaagagggtttcaaagttt

SEQ ID NO: 1039 - DNA, 533 bp, Homo sapiens
ccaagcccgtgcaccgttttttgtaaggtatctctttaagcgcctgggaccccaagcgagagtccgaaattagcagagcgctaaaaggaggggcccgaaggcagtggggctttgagctagaagcctctttttacctgcttgacaggtaatttctgtaattggttgtgattgaatttgatagggtagagaattaaatgagggaagctgtgtatacttcctagtaagagctattatatgactgattacattaacatcatatggaaaaaaattgtcaaaagtactccgggaaagcccttaaatagttggtaaagtacagaacacatgattgtcaatatatgtaaatacaggatgagctaggacagaggggcccttctttcacaccacttaaattagttcccactttaaccttgtttgagattgacttctggagagttaaatgcagatagacttaactctcctaagtcaggtgagactgagagctgactgctacaataattacggagcccaaatgcagtaaaacagcctgtttttca

SEQ ID NO: 1040 - DNA, 317 bp, Homo sapiens
  misc_feature 149, 228: n = A,T,C or G
tgcctgctggggattactcgatcaaaaccttccttccctggctacttcccttcctcccggggccttccttttgaggagctggaggggtggggagctagaggccacctatgccagtgctcaaggttactgggagtgtgggctgcccttgntgcctgcacccttccctcttccctctccctctctctgggaccactgggtacaagagatgggatgctccgacagcgtctncaattatgaaactaatcttaacccctgtgctgtcagataccctgtttctggagtcacatcagtgaggagggatgtgggtaagaggagca

SEQ ID NO: 1041 - DNA, 407 bp, Homo sapiens
  misc_feature 45, 88, 184, 236, 238: n = A,T,C or G
ccaagacagtccacttacatggatcgtgtcttcaagcaatttgtncaagccatggttgagcatggacatgaactctcttaacatgtanttctttgggtgcattttgtctgaaccacaattgtgaaggcagctcagcttagtgcacaaattttaactgttgtatataaagcaaataagtcagcanatgggtgaagaggtccagaatgatatgcaaaaactactttttagagaaacanancaactttgtagcaacaaattaaatatagtattagattgttacttacgtagattttatttttactatgccttaccaagtacatccttaaacaaagtagtatgtacatgaaattgcacttaaccaaaactattgtgtaaaacaaatttttaattcctcagggttttaattt

SEQ ID NO: 1042 - DNA, 519 bp, Homo sapiens
  misc_feature 461: n = A,T,C or G
ccaccacacccaattccttgctggtatcatggcagccgccacgtgccaggattaccggctacatcatcaagtatgagaagcctgggtctcctcccagagaagtggtccctcggccccgccctggtgtcacagaggctactattactggcctggaaccgggaaccgaatatacaatttatgtcattgccctgaagaataatcagaagagcgagcccctgattggaaggaaaaagacagacgagcttccccaactggtaacccttccacaccccaatcttcatggaccagagatcttggatgttccttccacagttcaaaagacccctttcgtcacccaccctgggtatgacactggaaatggtattcagcttcctggcacttctggtcagcaacccagtgttgggcaacaaatgatctttgaggaacatggttttaggcggaccacaccggcccacaacggncacccccataaaggcataggccaaagaccatacccgccgaatgtaggacaagaaagct

SEQ ID NO: 1043 - DNA, 294 bp, Homo sapiens
ccatgacagcagctactgcttcacatagcagcatacgccacatgttcaccttcaatatttttccagtctgtctatctttctccacacagtagcagctatcatagaactctgtgaaagcagttgccagctcatatatataatcacagagagtgtggagaaataagtcatctaaaatcttttgcagaatctcagggaaccgtaaaatgcaccggcctagtttccattccttctcatgatccaaaagaatcttggtttctcgagcagctttttggagcatttcttcatcaatattgg

SEQ ID NO: 1044 - DNA, 384 bp, Homo sapiens
ccaggcgctccttgtcggcatcagggagggtggccttgaactgctcatgggctgtggtcagtccctggatctcctcaatggtgtgcacaatgaaggtgtcctgcaggtcctccatggccccctccatccagttgttgaagggtgcagcccgcttggcatactccaagtacagctggtcaatggtctccagcagtttctcggtccgctccagagcttcccttcgcttctgagttagggcccccagattgtcccactggtcacagatcttttggcaacgggcgttgacactgggtgagtcataatagtccagctcattgagctcctgtgcgatggcggcaatctgctccacacggtcctggtgggcagccaggtcactctcgaagg

SEQ ID NO: 1045 - DNA, 456 bp, Homo sapiens
  misc_feature 118, 119: n = A,T,C or G
aaaactaatgttacaaatctgtattatcacttgtatataaatagtatatagctgatcattaataaggtgtataagtacaatgtattctaaaactgttaagcaaaaaaaaaaaacaaannaaaaatccaagtgtcctcctccaccactcacgctggtgatcactgtgctctctgccagctgcgtggagtgacgggaggagggaatcactgtgtgtgcgagagtgcttcagactcaatttccaaaataattttcacccctctaagcatgtaaatatacaaagatggatccttcatagaaattaaaaaatcaatttgagctcatttcgaatacagaacaagtatggcacagatggaagtcctgccacgtttcctttaatgatgctgactcttgtatcacacaggccagcatgaagtttcttactcagactttacaggcattttccgtaattcaatcagt

SEQ ID NO: 1046 - DNA, 136 bp, Homo sapiens
  misc_feature 3, 27, 80, 97, 104: n = A,T,C or G
atnatctgtttctaaacgaaagctgcngcggaatgagagtgagccttcagagatgaaagccatggctctgaaaggtggcngggcagaaggaaccctncgttcanctaaaagtgaggagtctcttacatctctccat

SEQ ID NO: 1047 - DNA, 453 bp, Homo sapiens
aaaaaaatccaaatgctggcattgtccagaaaaatttaacaggtttatttataattattataaagttgaaccgctgaaacttgttcactgaaacattttaacttgcattaatgctttacgtctccgcatttatattaaaaattcacacacaaatgaaaatggaaaaactgccaatacctgatttctgtcccctatttttccactcgcaatcatatacttaggtaccttttgaccccatggaaaaaaaatatctaacgttcagaactaccaataacaggaagaagagaaattttttttttttttttgggaatgaaatgtttcccatcatagtggattcttaagcacgttctccacgtatgcggcgtgctagctggatgtcttttggcataattgttacacgtttggcatggatagcacacaggttggtgtcttcaaaaaggccaaccagatagg

SEQ ID NO: 1048 - DNA, 219 bp, Homo sapiens
  misc_feature 13: n = A,T,C or G
aaaatcacaaacnttaacggcagtaggcaccaccatgtaaaagtgagctcagacgtctctaaaaaatgtttcctttataaaagcacatggcggttgaatcttaaggttaaattttaatatgaaagatcctcatgaattaaatagttgatgcaatttttaacgttaattgatataaaaaaaaacaacaaaattaggcttgtaaaactgactttttcatta

SEQ ID NO: 1049 - DNA, 2465 bp, Homo sapiens
agcaaataatcaatttagcattacaaaaaacagggatggtagggaaaatagaaggagaaaactctaaaataggtgatgataatgaaaatttaacctttaaattagaagtaaatgagctgagtggtaaattagacaacactaacgaatacaatagtaatgatggtaagaaattaccccagggtgaatcacgaagttacgaagtcatgggaagtatggaagaaaccttatgcaatatagatgacagagatggaaatcgcaatgtccatttagaatttacagaaagagagagtaggaaggatggagaggatgaatttgtcaaagaaatgagagaggaaagaaaatttcagaaattgaagaataaagaggaggttttaaaagcctccagagaagaaaaagtgttgatggatgaaggagcagtacttaccctggcagccgacctttcatcagcaacactggatattagtaagcaatggagtaatgtcttcaacattctgagagaaaatgattttgaacctaaatttctgtgtgaagttaaattagcatttaaatgtgatggtgaaataaagacattttcagatctgcaaagccttagaaaatttgccagccaaaaatcttctatgaaagaattactgaaagatgtactcccacaaaaggaagaaataaatcaaggaggaagaaaatatggaattcaagaaaaaagggataaaaccctaatagactcaaagcatagagctggagaaataaccagtgatggcttgagcttcctatttcttaaagaagtaaaagttgctaagccagaggagatgaaaaacttagagactcaagaggaagagttttccgagctagaggagctggatgaagaggcctcagggatggaggatgatgaagatacctcagggctggaggaggaggaggaagagccctcagggctggaggaggaagaagaagaagaggcttcagggttggaggaggatgaggcctcagggctagaggaggaagaggaacagacttcagaacaggactcaacctttcagggtcatactttggtagatgcaaagcatgaagttgagataaccagtgatggcatggaaactactttcattgactctgtagaggattctgaatcagaggaggaagaagaaggaaagagctctgaaacaggaaaggtaaagactacctccctgactgagaaaaaagcctcacgtagacaaaaagaaattccctttagttatttggttggggactctgggaagaaaaagttggtgaaacaccaggtggtgcacaaaacccaggaggaagaggaaacagctgtgcccacaagtcaaggaactggcacaccctgtctgaccttatgttaggcctctccctcaaagtcactagagatgagtcatgatgagcataaaaagcattcacatacaaatttgagtatttcaacaggagtcaccaaacttaagaaaacagaagaaaagaaacacagaactctgcacacagaagaactaacatccaaagaagcagacttaacagaggaaacagaagaaaacttgagaagtagtgtgattaatagcatcagagagataaaagaggagattggaaatttgaaaagttcccattcaggtgtcttggaaattgaaaattcagtagatgatctgagtagcagaatggacatacttgaagaaagaatagacagtctagaagatcaaattgaagaattctctaaggatacaatgcaaatgaccaaacagataattagtaaagaaaggcaaagagatatagaggagagatctagaagttgcaacattcgtttgataggaattccagaaaaggagagttatgagaatagggcagaggacataattaaagaaataattgatgaaaactttgcagaactaaagaaaggttcaagtcttgagattgtcagtgcttgtcgagtacctagtaaaattgatgaaaagagactgactcctagacacatcttggtgaaattttggaattctagtgataaagagaaaataataagggcttctagagagagaagagaaattacctaccaaggaacaagaatcaggttgacagcagacttatcactggacacactggatgctagaagtaaatggagcaatgtcttcaaagttctgctggaaaaaggctttaatcctagaatcctatatccagccaaaatggcatttgattttaggggtaaaacaaaggtatttcttagtattgaagaatttagagattatgttttgcatatgcccaccttgagagaattactggggaataatataccttagcacgccagggtgactacaaacaatatgctttcctcccccagcatgcatccaaaaatcaacaagtaaaacgaaaatacacttctacccagaaggatggacagctaatagcgtacttggggatgaggagcaaggaatattacagatattacctagatgttaataaagggtatgttt

SEQ ID NO: 1050 - DNA, 3120 bp, Homo sapiens
aaaggaaacacaagttgcttttgataacacatgatgcaaagaaagaattagaaagaatgagcaatgaagccggtataaatgacaaacaagtgtccaaaggcccaagaagttactaccaaaagctttcaaacaatattggtttatctttaaagacacatccatagcatactttaaaaataaggaacttgaacaaggagaaccacaagaaaaactaaatcttagaggctgcgaagttgtgcccgatgtaaatgtagcaggaagaaaatttggaatcaagttactaatccctgttgccgatggtatgaatgaaatgtatttgagatgtgaccatgagaatcaatacgcccaatggatggctgcctgcatgttggcatcgaagggcaaaaccatggcagacagctcctaccagccagaggtcctcaacatcctttcatttctgaggatgaaaaacaggaactctgcatctcaggtggcttccagtctcgaaaacatggatatgaacccagaatgttttgtgtcaccacggtgtgcaaaaagacacaaatccaaacagctggccgcccggatcctggaggcgcaccagaacgtggcccagatgcccctggtcgaagccaagctgcggttcatccaggcgtggcagtcactgcctgagtttggcctcacctactaccttgtcagatttaaaggaagcaaaaaagatgacattctgggagtttcatataacaggttgattaaaattgatgcagccaccgggattccagtgacaacatggagattcacaaatatcaaacagtggaatgtaaactgggaaacccggcaggtggtcatcgagtttgaccaaaacgtctttactgctttcacctgcctgagtgcagattgcaagattgtgcacgagtacattggcggctacattttcttgtccacccgctccaaggaccagaatgaaacactcgatgaggacttgttccacaaattgaccggcggtcaggattgaaacaagcacgcgtgctcggctcacaccaacaaggcaagccaaaggcgcccctccccagagggatccctaacgtgcccagcatgtagattctggactaacagacaacatacattcaccgctggtcacccagatcctcattcaaacccactgctggcacatccctttccttactttgccctgtgctaccagccacggaaggagcctctcttgttttttctataaaatgggtaggcaggagaaaagcaggtgccctaagattgctctaaggcccagcatgtggttacagttctctgacttgcagaacctgccaggtgtatggctacaagttatcctcgtgctgatctgtctcattactaagtcaatggagaagacagaaaggtaaaaatcacgtgtagcaagaacaactcttatttcacaaactcaggtatgaaacgaaacgcctgtccttcatggaactgcttttagctcctgtcttttcaaaatggcagagggagttcctacacacactttttccctggaggccaaggtctaggggtagaaaggggaggggtggggctaccaggtagcagttgacaacccaaggtcagaggagtggccctcagtgtcatctgtccacagtgatacctgccaagatgaccactgacccacatctggtcttagtcattggtctcctcagatttctggggccacctgcaagccccattccattcctacagatctctcagccacctgtaagtcctttgtgaagatgtgggtgacacagggggacaggaaaacccatttctcaacccagatccatgtctccactgcttctactctgggttgggattcaggaagacaggcacagtcctctctgttcatagaaacacctgccagtgtcaaggattccagtcaggtgtctatcccaactggtcagggagagaagggcagacccattctcaaagaccaccatgttcaaggtctgacagctccccactggctgcccccacaggggctttaggctggtctgggtcatggggaagcgtccctcttatcgctggtctgtgttctcctggatttggtatctatgttggtacgactcctggccttttatctaaaggactttggcttttgtaaatcacaagccaataatagacttttttctccccctctgttttttgctgtgtcatctctgccttgagactgccttgagacagtgcttgccctgagagagtgagccaattaacagctgcctgaattgtcattttccattttggtttgttagaggtgggaggggtgggttttgagaaggtcaaaagcaataccagaagtaaagggaaatatcagacaatattttattattttttcatagatgttctgccacacaaagaacttggggtgtaaggataaggcaaaagctccaatcccatttttcagttctcctaggatgcacccctcagggagcctggccagagttccgaggcccgtgagcgtcagctgttgctttattttccatcaaagccctctgagaagtgagacctcagcaattccgggagccacatagagacagacttggcaagggaccccctggttctgagccagtagctgccatctggaaattcctcttttagcctctccttagaggtgaatgtgaatgaagcctcccaggcacccgctgaatttctgaggccttgcttaaagctcagaagtggtttaggcatttggaaaatctggttcacatcataaagaacttgatttgaaatgttttctatagaaacaagtgctaagtgtaccgtattatacttgatgttggtcatttctcagtcctatttctcagttctattattttagaacctagtcagttctttaagattataactggtcctacattaaaataatgcttctcgatgtcagattttacctgtttgctgctgagaacatctctgcctaatttaccaaagccagaccttcagttcaacatgcttccttagcttttcatagttgtctgacatttccatgaaaacaaaggaaccaactttgttttaaccaaactttgtttggttacagttttcaggggagcgtttcttccatgacacacagcaacatcccaaagaaataaacaagtgtgacaaaaaaaaaaaaaaaaa

SEQ ID NO: 1051 - DNA, 1745 bp, Homo sapiens
gcgcccctggcagccttcaacgtcggtccccaggcagcatggtgaggtctgctcccggaccctcgccaccatgtacgtgagctacctcctggacaaggacgtgagcatgtaccctagctccgtgcgccactctggcggcctcaacctggcgccgcagaacttcgtcagccccccgcagtacccggactacggcggttaccacgtggcggccgcagctgcagcgcagaacttggacagcgcgcagtccccggggccatcctggccggcagcgtatggcgccccactccgggaggactggaatggctacgcgcccggaggcgcggccgccgccaacgccgtggctcacgcgctcaacggtggctccccggccgcagccatgggctacagcagccccgcagactaccatccgcaccaccacccgcatcaccacccgcaccacccggccgccgcgccttcctgcgcttctgggctgctgcaaacgctcaaccccggccctcctgggcccgccgccaccgctgccgccgagcagctgtctcccggcggccagcggcggaacctgtgcgagtggatgcggaagccggcgcagcagtccctcggcagccaagtgaaaaccaggacgaaagacaaatatcgagtggtgtacacggaccaccagcggctggagctggagaaggagtttcactacagtcgctacatcaccatccggaggaaagccgagctagccgccacgctggggctctctgagaggcaggttaaaatctggtttcagaaccgcagagcaaaggagaggaaaatcaacaagaagaagttgcagcagcaacagcagcagcagccaccacagccgcctccgccgccaccacagcctccccagcctcagccaggtcctctgagaagtgtcccagagcccttgagtccggtgtcttccctgcaagcctcagtgtctggctctgtccctggggttctggggccaactgggggggtgctaaaccccaccgtcacccagtgacccaccggggtctgcagcggcagagcaattccaggctgagccatgaggagcgtggactctgctagactcctcaggagagacccctcccctcccacccacagccatagacctacagacctggctctcagaggaaaaatgggagccaggagtaagacaagtgggatttggggcctcaagaaatatactctcccagatttttactttttccatctggctttttctgccactgaggagacagaaagcctccgctgggcttcattccggactggcagaagcattgcctggactgaccacaccaaccagcttcatctatccgactcttctcttcctagatctgcaggctgcacctctggctagagccgaggggagagagggactcaagggaaaggcaagcttgaggccaagatggctgctgcctgctcatggccctcggaggtccagctgggcctcctgcctccgggcagcaaggtttacactgcggaacgcaaaggcagctaagatagaaagctggactgaccaaagactgcagaacccccaggtggccctgcgtcttttttctcttccctttcccagaccaggaaaggcttggctggtgtatgcacagggtgtggtatgagggggtggttattggactccaggcctgaccagggggcccgaacaggacttgttagagagcctgtcaccagagcttctctgggctgaatgtatgtcagtgctataaatgccagagccaacctgg

SEQ ID NO: 1052 - DNA, 1104 bp, Homo sapiens
ctctagagtcgagatccattgtgctctaaagtggatacagaaatctctgcaggcaagttgctccagagcatattgcaggacaagcctgtaacgaatagttaaattcacggcatctggattcctaatccttttccgaaatggcaggtgtgagtgcctgtataaaatattctatgtttaccttcaacttcttgttctggctatgtggtatcttgatcctagcattagcaatatgggtacgagtaagcaatgactctcaagcaatttttggttctgaagatgtaggctctagctcctacgttgctgtggacatattgattgctgtaggtgccatcatcatgattctgggcttcctgggatgctgcggtgctataaaagaaagtcgctgcatgcttctgttgtttttcataggcttgcttctgatcctgctcctgcaggtggcgacaggtatcctaggagctgttttcaaatctaagtctgatcgcattgtgaatgaaactctctatgaaaacacaaagcttttgagcgccacaggggaaagtgaaaaacaattccaggaagccataattgtgtttcaagaagagtttaaatgctgcggtttggtcaatggagctgctgattggggaaataattttcaacactatcctgaattatgtgcctgtctagataagcagagaccatgccaaagctataatggaaaacaagtttacaaagagacctgtatttctttcataaaagacttcttggcaaaaaatttgattatagttattggaatatcatttggactggcagttattgagatactgggtttggtgttttctatggtcctgtattgccagatcgggaacaaatgaatctgtggatgcatcaacctatcgtcagtcaaacccctttaaaatgttgctttggctttgtaaatttaaatatgtaagtgctatataagtcaggagcagctgtctttttaaaatgtctcggctagctagaccacagatatcttctagacatattgaacacatttaagatttgagggatataagggaaaatgatatgaatgtgtatttttactcaaaataaaagtaactgtttaaaaaaaaaaaaaaaaaaaaa

SEQ ID NO: 1053 - DNA, 480 bp, Homo sapiens
cagtcctgagctgcgtcccggagcccacggtggtcatggctgccagagcgctctgcatgctggggctggtcctggccttgctgtcctccagctctgctgaggagtacgtgggcctgtctgcaaaccagtgtgccgtgccagccaaggacagggtggactgcggctacccccatgtcacccccaaggagtgcaacaaccggggctgctgctttgactccaggatccctggagtgccttggtgtttcaagcccctgcaggaagcagaatgcaccttctgaggcacctccagctgcccccggccgggggatgcgaggctcggagcacccttgcccggctgtgattgctgccaggcactgttcatctcagcttttctgtccctttgctcccggcaagcgcttctgctgaaagttcatatctggagcctgatgtcttaacgaataaaggtcccatgctccacccgaggacagttcttcgtgcctg

SEQ ID NO: 1054 - DNA, 1078 bp, Homo sapiens
cagccactagcgcagctcgagcgatggcctatgtccccgcaccgggctaccagcccacctacaacccgacgctgccttactaccagcccatcccgggcgggctcaacgtgggaatgtctgtttacatccaaggagtggccagcgagcacatgaagcggttcttcgtgaactttgtggttgggcaggatccgggctcagacgtcgccttccacttcaatccgcggtttgacggctgggacaaggtggtcttcaacacgttgcagggcgggaagtggggcagcgaggagaggaagaggagcatgcccttcaaaaagggtgccgcctttgagctggtcttcatagtcctggctgagcactacaaggtggtggtaaatggaaatcccttctatgagtacgggcaccggcttcccctacagatggtcacccacctgcaagtggatggggatctgcaacttcaatcaatcaacttcatcggaggccagcccctccggccccagggacccccgatgatgccaccttaccctggtcccggacattgccatcaacagctgaacagcctgcccaccatggaaggacccccaaccttcaacccgcctgtgccatatttcgggaggctgcaaggagggctcacagctcgaagaaccatcatcatcaagggctatgtgcctcccacaggcaagagctttgctatcaacttcaaggtgggctcctcaggggacatagctctgcacattaatccccgcatgggcaacggtaccgtggtccggaacagccttctgaatggctcgtggggatccgaggagaagaagatcacccacaacccatttggtcccggacagttctttgatctgtccattcgctgtggcttggatcgcttcaaggtttacgccaatggccagcacctctttgactttgcccatcgcctctcggccttccagagggtggacacattggaaatccagggtgatgtcaccttgtcctatgtccagatctaatctattcctggcataactcatgggaaaacagaattatcccctagactcctttctaagcccctaataaaatgtctgagggtgtc

SEQ ID NO: 1055 - DNA, 2872 bp, Homo sapiens
aggaacaggccgcacacaacagcattccctggcagtaccaccatgccaggcgtcagtcaggaatctacagcttcccacagcagcccaggctccacagacacaacactgtcccctggcagtaccacagcatcatcccttggtccagaatctactaccttccacagcggcccaggctccactgaaacaacactcttacctgacaacaccacagcctccggcctccttgaagcatctacgcccgtccacagcagcactggatcgccacacacaacactgtcccctgccggctctacaacccgtcagggagaatctaccaccttccagagctggcctaactcgaaggacactacccctgcacctcctactaccacatcagcctttgttgagctatctacaacctcccacggcagcccgagctcaactccaacaacccacttttctgccagctccacaaccttgggccgtagtgaggaatcgacaacagtccacagcagcccagttgcaactgcaacaacaccctcgcctgcccgctccacaacctcaggcctcgttgaagaatctacgacctaccacagcagcccgggctcaactcaaacaatgcacttccctgaaagcgacacaacttcaggccgtggtgaagaatcaacaacttcccacagcagcacaacacacacaatatcttcagctcctagcaccacatctgcccttgttgaagaacctaccagctaccacagcagcccgggctcaactgcaacaacacacttccctgacagctccacaacctcaggccgtagtgaggaatcaacagcatcccacagcaaccaagacgcaacgggaacaatagtcctacctgcccgctccacaacctcagttcttcttggagaatctacgacctcacccatcagttcaggctcaatggaaacgacagcgttacccggcagtaccacaacgccaggcctcagtgagaaatctaccactttccacagtagccccagatcaccagccacaacactctcacctgccagcacgacaagctcaggcgtcagtgaagaatccaccacctcccacagccgaccaggctcaacgcacacaacagcattccctgacagcaccaccacgccaggcctcagtcggcattctacaacttcccacagcagcccaggctcaacggatacaacactgttacctgccagcaccaccacctcaggccccagtcaggaatcaacaacttcccacagcagcccaggttcaactgacacagcactgtcccctggcagtaccacagccttatcctttggtcaagaatctacaaccttccacagcagcccaggctccactcacacaacactcttccctgacagcaccacaagctcaggcatcgttgaagcatctacacgcgtccacagcagcactggctcaccacgcacaacactgtcccctgccagctccacaagccctggacttcagggagaatctaccgccttccagacccacccagcctcaactcacacgacgccttcaactcctagcaccgcaacagcccctgttgaagaatctacaacctaccaccgcagcccaagctcgactccaacaacacacttccctgccagctccacaacttcgggccacagtgagaaatcaacaatattccacagcagcccagatgcaagtggaacaacaccctcatctgcccactccacaacctcaggtcgtggagaatctacaacctcacgcatcagtccaggctcaactgaaataacaacgttacctggcagtaccacaacaccaggcctcagtgaggcatctaccaccttctacagcagccccagatcaccaaccacaacactctcacctgccagcatgacaagcctaggcgtcggtgaagaatccaccacctcccgtagccaaccaggttctactcactcaacagtgtcacctgccagcaccaccacgccaggcctcagtgaggaatctaccaccgtctacagcagcagcccaggctcaactgaaaccacagtgttccctcgcagcaccacaacctcagttcgtggtgaagagcctacaaccttccacagccggccagcctcaactcacacaacactgttcactgaggacagcaccacctcgggcctcactgaagaatctacagccttccccggcagcccagcctccacccaaacagggttacctgccacactcacaaccgcagacctcggtgaggaatcaactacctttcccagcagctcaggctcaactggaacaacactctcacctgcccgctccaccacctctggcctcgttggagaatccacaccctcacgcctcagtccaagctcaaccgaaacaacaactttacccggcagtcccacaacaccaagcctcagtgagaaatcaaccaccttctacactagccccagatcaccagatgcaacactctcacctgcaaccacaacaagctcaggcgtcagcgaagaatccagcacatcccacagtcaaccaggctcaacgcacacaacagcgttccctgacagcaccaccacctcaggcctcagtcaggaacctaaaacttcccacagcagccaaggctcaacagaggcaacactgtcccctggcagtaccacagcctcatcccttggtcaacaatctacaaccttccacagcagcccaggcgacactgaaaccacactcttacctgatgacaccataacctcaggcctcgtggaggcatctacacccacccacagcagcactggctcgctacacacaacactgacccctgccagctccacaagcgctggccttcaggaagaatctactactttccagagctggccaagctcaagtgacacaacaccttcacctcccggcccgg

SEQ ID NO: 1056 - DNA, 3311 bp, Homo sapiens
tgctaatgcttttggtacaaatggatgtggaatataattgaatattttcttgtttaaggggagcatgaagaggtgttgaggttatgtcaagcatctggcacagctgaaggcagatggaaatatttacaagtacgcaatttgagactaagatattgttatcattctcctattgaagacaagagcaatagtaaaacacatcaggtcagggggttaaagacctgtgataaaccacttccgataagttggaaacgtgtgtctatattttcatatctgtatatatataatggtaaagaaagacaccttcgtaacccgcattttccaaagagaggaatcacagggagatgtacagcaatggggccatttaagagttctgtgttcatcttgattcttcaccttctagaaggggccctgagtaattcactcattcagctgaacaacaatggctatgaaggcattgtcgttgcaatcgaccccaatgtgccagaagatgaaacactcattcaacaaataaaggacatggtgacccaggcatctctgtatctgtttgaagctacaggaaagcgattttatttcaaaaatgttgccattttgattcctgaaacatggaagacaaaggctgactatgtgagaccaaaacttgagacctacaaaaatgctgatgttctggttgctgagtctactcctccaggtaatgatgaaccctacactgagcagatgggcaactgtggagagaagggtgaaaggatccacctcactcctgatttcattgcaggaaaaaagttagctgaatatggaccacaaggtaaggcatttgtccatgagtgggctcatctacgatggggagtatttgacgagtacaataatgatgagaaattctacttatccaatggaagaatacaagcagtaagatgttcagcaggtattactggtacaaatgtagtaaagaagtgtcagggaggcagctgttacaccaaaagatgcacattcaataaagttacaggactctatgaaaaaggatgtgagtttgttctccaatcccgccagacggagaaggcttctataatgtttgcacaacatgttgattctatagttgaattctgtacagaacaaaaccacaacaaagaagctccaaacaagcaaaatcaaaaatgcaatctccgaagcacatgggaagtgatccgtgattctgaggactttaagaaaaccactcctatgacaacacagccaccaaatcccaccttctcattgctgcagattggacaaagaattgtgtgtttagtccttgacaaatctggaagcatggcgactggtaaccgcctcaatcgactgaatcaagcaggccagcttttcctgctgcagacagttgagctggggtcctgggttgggatggtgacatttgacagtgctgcccatgtacaaagtgaactcatacagataaacagtggcagtgacagggacacactcgccaaaagattacctgcagcagcttcaggagggacgtccatctgcagcgggcttcgatcggcatttactgtgattaggaagaaatatccaactgatggatctgaaattgtgctgctgacggatggggaagacaacactataagtgggtgctttaacgaggtcaaacaaagtggtgccatcatccacacagtcgctttggggccctctgcagctcaagaactagaggagctgtccaaaatgacaggaggtttacagacatatgcttcagatcaagttcagaacaatggcctcattgatgcttttggggccctttcatcaggaaatggagctgtctctcagcgctccatccagcttgagagtaagggattaaccctccagaacagccagtggatgaatggcacagtgatcgtggacagcaccgtgggaaaggacactttgtttcttatcacctggacaacgcagcctccccaaatccttctctgggatcccagtggacagaagcaaggtggctttgtagtggacaaaaacaccaaaatggcctacctccaaatcccaggcattgctaaggttggcacttggaaatacagtctgcaagcaagctcacaaaccttgaccctgactgtcacgtcccgtgcgtccaatgctaccctgcctccaattacagtgacttccaaaacgaacaaggacaccagcaaattccccagccctctggtagtttatgcaaatattcgccaaggagcctccccaattctcagggccagtgtcacagccctgattgaatcagtgaatggaaaaacagttaccttggaactactggataatggagcaggtgctgatgctactaaggatgacggtgtctactcaaggtatttcacaacttatgacacgaatggtagatacagtgtaaaagtgcgggctctgggaggagttaacgcagccagacggagagtgataccccagcagagtggagcactgtacatacctggctggattgagaatgatgaaatacaatggaatccaccaagacctgaaattaataaggatgatgttcaacacaagcaagtgtgtttcagcagaacatcctcgggaggctcatttgtggcttctgatgtcccaaatgctcccatacctgatctcttcccacctggccaaatcaccgacctgaaggcggaaattcacgggggcagtctcattaatctgacttggacagctcctggggatgattatgaccatggaacagctcacaagtatatcattcgaataagtacaagtattcttgatctcagagacaagttcaatgaatctcttcaagtgaatactactgctctcatcccaaaggaagccaactctgaggaagtctttttgtttaaaccagaaaacattacttttgaaaatggcacagatcttttcattgctattcaggctgttgataaggtcgatctgaaatcagaaatatccaacattgcacgagtatctttgtttattcctccacagactccgccagagacacctagtcctgatgaaacgtctgctccttgtcctaatattcatatcaacagcaccattcctggcattcacattttaaaaattatgtggaagtggataggagaactgcagctgtcaatagcctagggctgaatttttgtcagataaataaaataaatcattcatcctttttttgattataaaattttctaaaatgtattttagacttcctgtagggggcgatatactaaatgtatatagtacatttatactaaatgtattcctgtagggggcgatatactaaatgtattttagacttcctgtagggggcgataaaataaaatgctaaacaactgggtaaa

SEQ ID NO: 1057 - DNA, 2095 bp, Homo sapiens
aaacactctcacctgccagcatgagaagctccagcatcagtggagaacccaccagcttgtatagccaagcagagtcaacacacacaacagcgttccctgccagcaccaccacctcaggcctcagtcaggaatcaacaactttccacagtaagccaggctcaactgagacaacactgtcccctggcagcatcacaacttcatcttttgctcaagaatttaccacccctcatagccaaccaggctcagctctgtcaacagtgtcacctgccagcaccacagtgccaggccttagtgaggaatctaccaccttctacagcagcccaggctcaactgaaaccacagcgttttctcacagcaacacaatgtccattcatagtcaacaatctacacccttccctgacagcccaggcttcactcacacagtgttacctgccaccctcacaaccacagacattggtcaggaatcaacagccttccacagcagctcagacgcaactggaacaacacccttacctgcccgctccacagcctcagaccttgttggagaacctacaactttctacatcagcccatcccctacttacacaacactctttcctgcgagttccagcacatcaggcctcactgaggaatctaccaccttccacaccagtccaagcttcacttctacaattgtgtctactgaaagcctggaaaccttagcaccagggttgtgccaggaaggacaaatttggaatggaaaacaatgcgtctgtccccaaggctacgttggttaccagtgcttgtcccctctggaatccttccctgtagaaaccccggaaaaactcaacgccactttaggtatgacagtgaaagtgacttacagaaatttcacagaaaagatgaatgacgcatcctcccaggaataccagaacttcagtaccctcttcaagaatcggatggatgtcgttttgaagggcgacaatcttcctcagtatagaggggtgaacattcggagattgctcaacggtagcatcgtggtcaagaacgatgtcatcctggaggcagactacactttagagtatgaggaactgtttgaaaacctggcagagattgtaaaggccaagattatgaatgaaactagaacaactcttcttgatcctgattcctgcagaaaggccatactgtgctatagtgaagaggacactttcgtggattcatcggtgactccgggctttgacttccaggagcaatgcacccagaaggctgccgaaggatatacccagttctactatgtggatgtcttggatgggaagctggcctgtgtgaacaagtgcaccaaaggaacgaagtcgcaaatgaactgtaacctgggcacatgtcagctgcaacgcagtggcccccgctgcctgtgcccaaatacgaacacacactggtactggggagagacctgtgaattcaacatcgccaagagcctcgtgtatgggatcgtgggggctgtgatggcggtgctgctgctcgcattgatcatcctaatcatcttattcagcctatcccagagaaaacggcacagggaacagtatgatgtgcctcaagagtggcgaaaggaaggcacccctggcatcttccagaagacggccatctgggaagaccagaatctgagggagagcagattcggccttgagaacgcctacaacaacttccggcccaccctggagactgttgactctggcacagagctccacatccagaggccggagatggtagcatccactgtgtgagccaacgggggcctcccaccctcatctagctctgttcaggagagctgcaaacacagagcccaccacaagcctccggggcgggtcaagaggagaccgaagtcaggccctgaagccggtcctgctctgagctgacagacttggccagtcccctgcctgtgctcctgctggggaaggctgggggctgtaagcctctccatccgggagcttccagactcccagaagcctcggcacccctgtctcctcctgggtggctccccactctggaatttccctaccaataaaagcaaatctgaaagctcaaaaaaaaaaaaaaaaaaaaaaaaaaaaaaaaaaaa

SEQ ID NO: 1058 - DNA, 15720 bp, Homo sapiens
caacccacaccgcccctgccagccaccatggggctgccactagcccgcctggcggctgtgtgcctggccctgtctttggcagggggctcggagctccagacagagggcagaacccgataccacggccgcaacgtctgcagcacctggggcaacttccactacaagaccttcgacggggacgtcttccgcttccccggcctctgcgactacaacttcgcctccgactgccgaggctcctacaaggaatttgctgtgcacctgaagcggggtccgggccaggctgaggcccccgccggggtggagtccatcctgctgaccatcaaggatgacaccatctacctcacccgccacctggctgtgcttaacggggccgtggtcagcaccccgcactacagccccgggctgctcattgagaagagcgatgcctacaccaaagtctactcccgcgccggcctcaccctcatgtggaaccgggaggatgcactcatgctggagctggacactaagttccggaaccacacctgtggcctctgcggggactacaacggcctgcagagctattcagaattcctctctgacggcgtgctcttcagtcccctggagtttgggaacatgcagaagatcaaccagcccgatgtggtgtgtgaggatcccgaggaggaggtggcccccgcatcctgctccgagcaccgcgccgagtgtgagaggctgctgaccgccgaggccttcgcggactgtcaggacctggtgccgctggagccgtatctgcgcgcctgccagcaggaccgctgccggtgcccgggcggtgacacctgcgtctgcagcaccgtggccgagttctcccgccagtgctcccacgccggcggccggcccgggaactggaggaccgccacgctctgccccaagacctgccccgggaacctggtgtacctggagagcggctcgccctgcatggacacctgctcacacctggaggtgagcagcctgtgcgaggagcaccgcatggacggctgtttctgcccagaaggcaccgtatatgacgacatcggggacagtggctgcgttcctgtgagccagtgccactgcaggctgcacggacacctgtacacaccgggccaggagatcaccaatgactgcgagcagtgtgtctgtaacgctggccgctgggtgtgcaaagacctgccctgccccggcacctgtgccctggaaggcggctcccacatcaccaccttcgatgggaagacgtacaccttccacggggactgctactatgtcctggccaagggtgaccacaacgattcctacgctctcctgggcgagctggccccctgtggctccacagacaagcagacctgcctgaagacggtggtgctgctggctgacaagaagaagaatgcggtggtcttcaagtccgatggcagtgtactgctcaaccagctgcaggtgaacctgccccacgtgaccgcgagcttctctgtcttccgcccgtcttcctaccacatcatggtgagcatggccattggcgtccggctgcaggtgcagctggccccagtcatgcaactctttgtgacactggaccaggcctcccaggggcaggtgcagggcctctgcgggaacttcaacggcctggaaggtgacgacttcaagacggccagcgggctggtggaggccacgggggccggctttgccaacacctggaaggcacagtcaacctgccatgacaagctggactggttggacgatccctgctccctgaacatcgagagcgccaactacgccgagcactggtgctccctcctgaagaagacagagaccccctttggcaggtgccactcggctgtggaccctgctgagtattacaagaggtgcaaatatgacacgtgtaactgtcagaacaatgaggactgcctgtgcgccgccctgtcctcctacgcgcgcgcctgcaccgccaagggcgtcatgctgtggggctggcgggagcatgtctgcaacaaggatgtgggctcctgccccaactcgcaggtcttcctgtacaacctgaccacctgccagcagacctgccgctccctctccgaggccgacagccactgtctcgagggctttgcgcctgtggacggctgcggctgccctgaccacaccttcctggacgagaagggccgctgcgtacccctggccaagtgctcctgttaccaccgcggtctctacctggaggcgggggatgtggtcgtcaggcaggaagaacgatgtgtgtgccgggatgggcggctgcactgtaggcagatccggctgatcggccagagctgcacggccccaaagatccacatggactgcagcaacctgactgcactggccacctcgaagccccgagccctcagctgccagacgctggccgccggctattaccacacagagtgtgtcagtggctgtgtgtgccccgacgggctgatggatgacggccggggtggctgcgtggtggagaaggaatgcccttgcgtccataacaacgacctgtattcttccggcgccaagatcaaggtggactgcaatacctgcacctgcaagagaggacgctgggtgtgcacccaggctgtgtgccatggcacctgctccatttacgggagtggccactacatcacctttgatgggaagtactacgactttgacggacactgctcctacgtggctgttcaggactactgcggccagaactcctcactgggctcattcagcatcatcaccgagaacgtcccctgtggcactacgggcgtcacctgctccaaggccatcaagatcttcatggggaggacggagctgaagttggaagacaagcaccgtgtggtgatccagcgtgatgagggtcaccacgtggcctacaccacgcgggaggtgggccagtacctggtggtggagtccagcacgggcatcatcgtcatctgggacaagaggaccaccgtgttcatcaagctggctccctcctacaagggcaccgtgtgtggcctgtgtgggaactttgaccaccgctccaacaacgacttcaccacgcgggaccacatggtggtgagcagcgagctggacttcgggaacagctggaaggaggcccccacctgcccagatgtgagcaccaaccccgagccctgcagcctgaacccgcaccgccgctcctgggccgagaagcagtgcagcatcctcaaaagcagcgtgttcagcatctgccacagcaaggtggaccccaagcccttctacgaggcctgtgtgcacgactcgtgctcctgtgacacgggtggggactgtgagtgcttctgctctgccgtggcctcctacgcccaggagtgtaccaaagagggggcctgcgtgttctggaggacgccggacctgtgccccatattctgcgactactacaaccctccgcatgagtgtgagtggcactatgagccatgtgggaaccggagcttcgagacctgcaggaccatcaacggcatccactccaacatctccgtgtcctacctggagggctgctacccccggtgccccaaggacaggcccatctatgaggaggatctgaagaagtgtgtcactgcagacaagtgtggctgctatgtcgaggacacccactacccacctggagcatcggttcccaccgaggagacctgcaagtcctgcgtgtgtaccaactcctcccaagtcgtctgcaggccggaggaaggaaagattcttaaccagacccaggatggcgccttctgctactgggagatctgtggccccaacgggacggtggagaagcacttcaacatctgttccattacgacacgcccgtccaccctgaccaccttcaccaccatcaccctccccaccacccccacctccttcaccactaccaccaccaccaccaccccgacctccagcacagttttatcaacaactccgaagctgtgctgcctctggtctgactggatcaatgaggaccaccccagcagtggcagcgacgacggtgaccgagaaccatttgatggggtctgcggggcccctgaggacatcgagtgcaggtcggtcaaggatccccacctcagcttggagcagcatggccagaaggtgcagtgtgatgtctctgttgggttcatttgcaagaatgaagaccagtttggaaatggaccatttggactgtgttacgactacaagatacgtgtcaattgttgctggcccatggataagtgtatcaccactcccagccctccaactaccactcccagccctccaccaaccacgacgaccacccttccaccaaccaccacccccagccctccaaccaccaccacaaccacccctccaccaaccaccacccccagccctccaataaccaccacgaccacccctctaccaaccaccactcccagccctccaataagcaccacaaccacccctccaccaaccaccactcccagccctccaaccaccactcccagccctccaaccaccactcccagccctccaacaaccaccacaaccacccctccaccaaccaccactcccagccctccaatgactacgcccatcactccaccagccagcactaccacccttccaccaaccaccactcccagccctccaacaaccaccacaaccacccctccaccaaccaccactcccagtcctccaacgactacgcccatcactccaccaaccagcactactacccttccaccaaccaccactcccagccctccaccaaccaccacaaccacccctccaccaaccaccactcccagccctccaacaaccaccactcccagtcctccaacaatcaccacaaccacccctccaccaaccaccactcccagccctccaacaacgaccacaaccacccctccaccaaccaccactcccagccctccaacgactacacccatcactccaccaaccagcactaccacccttccaccaaccaccactcccagccctccaccaaccaccacaaccacccctccaccaaccaccactcccagccctccaacaaccaccactcccagccctccaataaccaccacaaccacccctccaccaaccaccactcccagctctccaataaccaccactcccagccctccaacaaccaccatgaccaccccttcaccaaccaccacccccagctctccaataaccaccacaaccaccccttcctcaactaccactcccagccctccaccaaccaccatgaccaccccttcaccaaccaccactcccagccctccaacaaccaccatgaccacccttccaccaaccaccacttccagccctctaacaactactcctctacctccatcaataactcctcctacattttcaccattctcaacgacaacccctactaccccatgcgtgcctctctgcaattggactggctggctggattctggaaaacccaactttcacaaaccaggtggagacacagaattgattggagacgtctgtggaccaggctgggcagctaacatctcttgcagagccaccatgtatcctgatgttcccattggacagcttggacaaacagtggtgtgtgatgtctctgtggggctgatatgcaaaaatgaagaccaaaagccaggtggggtcatccctatggccttctgcctcaactacgagatcaacgttcagtgctgtgagtgtgtcacccaacccaccaccatgacaaccaccaccacagagaacccaactccgccaaccacgacacccatcaccaccaccactacggtgaccccaaccccaacacccaccggcacacagaccccaaccacgacacccatcaccaccaccactacggtgaccccaaccccaacacccaccggcacacagaccccaaccacgacacccatcaccaccaccactacggtgaccccaaccccaacacccaccggcacacagaccccaaccacgacacccatcaccaccaccactacggtgaccccaaccccaacacccaccggcacacagaccccaaccacgacacccatcaccaccaccactacggtgaccccaaccccaacacccaccggcacacagaccccaaccacgacacccatcaccaccaccactacggtgaccccaaccccaacacccaccggcacacagaccccaaccacgacacccatcaccaccaccactacggtgaccccaaccccaacacccaccggcacacagaccccaaccacgacacccatcaccaccaccactacggtgaccccaaccccaacacccaccggcacacagaccccaaccacgacacccatcaccaccaccactacggtgaccccaaccccaacacccaccggcacacagaccccaaccacgacacccatcaccaccaccactacggtgaccccaaccccaacacccaccggcacacagaccccaaccacgacacccatcaccaccaccactacggtgaccccaaccccaacacccaccggcacacagaccccaaccacgacacccatcaccaccaccactacggtgaccccaaccccaacacccaccggcacacagaccccaaccacgacacccatcaccaccaccactacggtgaccccaaccccaacacccaccggcacacagaccccaaccacgacacccatcaccaccaccactacggtgaccccaaccccaacacccaccggcacacagaccccaaccacgacacccatcaccaccaccactacggtgaccccaaccccaacacccaccggcacacagaccccaaccacgacacccatcaccaccaccactacggtgaccccaaccccaacacccaccggcacacagaccccaaccacgacacccatcaccaccaccactacggtgaccccaaccccaacacccaccggcacacagaccccaaccacgacacccatcaccaccaccactacggtgaccccaaccccaacacccaccggcacacagaccccaaccacgacacccatcaccaccaccactacggtgaccccaaccccaacacccaccggcacacagaccccaaccacgacacccatcaccaccaccactacggtgaccccaaccccaacacccaccggcacacagaccccaaccacgacacccatcaccaccaccactacggtgaccccaaccccaacacccaccggcacacagaccccaaccacgacacccatcaccaccaccactacggtgaccccaaccccaacacccaccggcacacagaccccaaccacgacacccatcaccaccaccactacggtgaccccaaccccaacacccaccggcacacagaccccaaccacgacacccatcaccaccaccactacggtgaccccaaccccaacacccaccggcacacagaccccaaccacgacacccatcaccaccaccactacggtgaccccaaccccaacacccaccggcacacagaccccaaccacgacacccatcaccaccaccactacggtgaccccaaccccaacacccaccggcacacagaccccaaccacgacacccatcaccaccaccactacggtgaccccaaccccaacacccaccggcacacagaccccaaccacgacacccatcaccaccaccactacggtgaccccaaccccaacacccaccggcacacagaccccaaccacgacacccatcaccaccaccactacggtgaccccaaccccaacacccaccggcacacagaccccaaccacgacacccatcaccaccaccactacggtgaccccaaccccaacacccaccggcacacagaccccaaccacgacacccatcaccaccaccactacggtgaccccaaccccaacacccaccggcacacagaccccaaccacgacacccatcaccaccaccactacggtgaccccaaccccaacacccaccggcacacagaccccaaccacgacacccatcaccaccaccactacggtgaccccaaccccaacacccaccggcacacagaccccaaccacgacacccatcaccaccaccactacggtgaccccaaccccaacacccaccggcacacagaccccaaccacgacacccatcaccaccaccactacggtgaccccaaccccaacacccaccggcacacagaccccaaccacgacacccatcaccaccaccactacggtgaccccaaccccaacacccaccggcacacagaccccaaccacgacacccatcaccaccaccactacggtgaccccaaccccaacacccaccggcacacagaccccaaccacgacacccatcaccaccaccactacggtgaccccaaccccaacacccaccggcacacagaccccaaccacgacacccatcaccaccaccactacggtgaccccaaccccaacacccaccggcacacagaccccaaccacgacacccatcaccaccaccactacggtgaccccaaccccaacacccaccggcacacagaccccaaccacgacacccatcaccaccaccactacggtgaccccaaccccaacacccaccggcacacagaccccaaccacgacacccatcaccaccaccactacggtgaccccaaccccaacacccaccggcacacagaccccaaccacgacacccatcaccaccaccactacggtgaccccaaccccaacacccaccggcacacagaccccaaccacgacacccatcaccaccaccactacggtgaccccaaccccaacacccaccggcacacagaccccaaccacgacacccatcaccaccaccactacggtgaccccaaccccaacacccaccggcacacagaccccaaccacgacacccatcaccaccaccactacggtgaccccaaccccaacacccaccggcacacagaccccaaccacgacacccatcaccaccaccactacggtgaccccaaccccaacacccaccggcacacagaccccaaccacgacacccatcaccaccaccactacggtgaccccaaccccaacacccaccggcacacagaccccaaccacgacacccatcaccaccaccactacggtgaccccaaccccaacacccaccggcacacagaccccaaccacgacacccatcaccaccaccactacggtgaccccaaccccaacacccaccggcacacagaccccaaccacgacacccatcaccaccaccactacggtgaccccaaccccaacacccaccggcacacagaccccaaccacgacacccatcaccaccaccactacggtgaccccaaccccaacacccaccggcacacagaccccaaccacgacacccatcaccaccaccactacggtgaccccaaccccaacacccaccggcacacagaccccaaccacgacacccatcaccaccaccactacggtgaccccaaccccaacacccaccggcacacagaccccaaccacgacacccatcaccaccaccactacggtgaccccaaccccaacacccaccggcacacagaccccaaccacgacacccatcaccaccaccactacggtgaccccaaccccaacacccaccggcacacagaccccaaccacgacacccatcaccaccaccactacggtgaccccaaccccaacacccaccggcacacagaccccaaccacgacacccatcaccaccaccactacggtgaccccaaccccaacacccaccggcacacagaccccaaccacgacacccatcaccaccaccactacggtgaccccaaccccaacacccaccggcacacagaccccaaccacgacacccatcaccaccaccactacggtgaccccaaccccaacacccaccggcacacagaccccaaccacgacacccatcaccaccaccactacggtgaccccaaccccaacacccaccggcacacagaccccaaccacgacacccatcaccaccaccactacggtgaccccaaccccaacacccaccggcacacagaccccaaccacgacacccatcaccaccaccactacggtgaccccaaccccaacacccaccggcacacagaccccaaccacgacacccatcaccaccaccactacggtgaccccaaccccaacacccaccggcacacagaccccaaccacgacacccatcaccaccaccactacggtgaccccaaccccaacacccaccggcacacagaccccaaccacgacacccatcaccaccaccactacggtgaccccaaccccaacacccaccggcacacagaccccaaccacgacacccatcaccaccaccactacggtgaccccaaccccaacacccaccggcacacagaccccaaccacgacacccatcaccaccaccactacggtgaccccaaccccaacacccaccggcacacagaccccaaccacgacacccatcaccaccaccactacggtgaccccaaccccaacacccaccggcacacagaccccaaccacgacacccatcaccaccaccactacggtgaccccaaccccaacacccaccggcacacagaccccaaccacgacacccatcaccaccaccactacggtgaccccaaccccaacacccaccggcacacagaccccaaccacgacacccatcaccaccaccactacggtgaccccaaccccaacacccaccggcacacagaccccaaccacgacacccatcaccaccaccactacggtgaccccaaccccaacacccaccggcacacagaccccaaccacgacacccatcaccaccaccactacggtgaccccaaccccaacacccaccggcacacagaccccaaccacgacacccatcaccaccaccactacggtgaccccaaccccaacacccaccggcacacagaccccaaccacgacacccatcaccaccaccactacggtgaccccaaccccaacacccaccggcacacagaccccaaccacgacacccatcaccaccaccactacggtgaccccaaccccaacacccaccggcacacagaccccaaccacgacacccatcaccaccaccactacggtgaccccaaccccaacacccaccggcacacagaccccaaccacgacacccatcaccaccaccactacggtgaccccaaccccaacacccaccggcacacagaccccaaccacgacacccatcaccaccaccactacggtgaccccaaccccaacacccaccggcacacagaccccaaccacgacacccatcaccaccaccactacggtgaccccaaccccaacacccaccggcacacagaccccaaccacgacacccatcaccaccaccactacggtgaccccaaccccaacacccaccggcacacagaccccaaccacgacacccatcaccaccaccactacggtgaccccaaccccaacacccaccggcacacagaccccaaccacgacacccatcaccaccaccactacggtgaccccaaccccaacacccaccggcacacagaccccaaccacgacacccatcaccaccaccactacggtgaccccaaccccaacacccaccggcacacagaccccaaccacgacacccatcaccaccaccactacggtgaccccaaccccaacacccaccggcacacagaccccaaccacgacacccatcaccaccaccactacggtgaccccaaccccaacacccaccggcacacagaccccaaccacgacacccatcaccaccaccactacggtgaccccaaccccaacacccaccggcacacagaccccaaccacgacacccatcaccaccaccactacggtgaccccaaccccaacacccaccggcacacagaccccaaccacgacacccatcaccaccaccactacggtgaccccaaccccaacacccaccggcacacagaccccaaccacgacacccatcaccaccaccactacggtgaccccaaccccaacacccaccggcacacagaccccaaccacgacacccatcaccaccaccactacggtgaccccaaccccaacacccaccggcacacagaccccaaccacgacacccatcaccaccaccactacggtgaccccaaccccaacacccaccggcacacagaccccaaccacgacacccatcaccaccaccactacggtgaccccaaccccaacacccaccggcacacagaccccaaccacgacacccatcaccaccaccactacggtgaccccaaccccaacacccaccggcacacagaccccaaccacgacacccatcaccaccaccactacggtgaccccaaccccaacacccaccggcacacagaccccaaccacgacacccatcaccaccaccactacggtgaccccaaccccaacacccaccggcacacagaccccaaccacgacacccatcaccaccaccactacggtgaccccaaccccaacacccaccggcacacagaccccaaccacgacacccatcaccaccaccactacggtgaccccaaccccaacacccaccggcacacagaccccaaccacgacacccatcaccaccaccactacggtgaccccaaccccaacacccaccggcacacagaccgggccccccacccacacaagcacagcaccgattgctgagttgaccacatccaatcctccgcctgagtcctcaacccctcagacctctcggtccacctcttcccctctcacggagtcaaccacccttctgagtaccctaccacctgccattgagatgaccagcacggccccaccctccacacccacggcacccacgaccacgagcggaggccacacactgtctccaccgcccagcaccaccacgtcccctccaggcacccccactcgcggtaccacgaccgggtcatcttcagcccccacccccagcactgtgcagacgaccaccaccagtgcctggaccccaacgccgaccccactctccacacccagcatcatcaggaccacaggcctgaggccctacccttcctctgtgcttatctgctgtgtcctgaacgacacctactacgcaccaggtgaggaggtgtacaacggcacatacggagacacctgttatttcgtcaactgctcactgagctgtacgttggagttctataactggtcctgcccatccacgccctccccaacacccacgccctccaagtcgacgcccacgccttccaagccatcgtccacgccctccaagccgacgcccggcaccaagccccccgagtgcccagactttgatcctcccagacaggagaacgagacttggtggctgtgcgactgcttcatggccacgtgcaagtacaacaacacggtggagatcgtgaaggtggagtgtgagccgccgcccatgcccacctgctccaacggcctccaacccgtgcgcgtcgaggaccccgacggctgctgctggcactgggagtgcgactgctactgcacgggctggggcgacccgcactatgtcaccttcgacggactctactacagctaccagggcaactgcacctacgtgctggtggaggagatcagcccctccgtggacaacttcggagtttacatcgacaactaccactgcgatcccaacgacaaggtgtcctgtccccgcaccctcatcgtgcgccacgagacccaggaggtgctgatcaagaccgtgcatatgatgcccatgcaggtgcaggtgcaggtgaacaggcaggcggtggcactgccctacaagaagtacgggctggaggtgtaccagtctggcatcaactacgtggtggacatccccgagctgggtgtcctcgtctcctacaatggcctgtccttctccgtcaggctgccctaccaccggtttggcaacaacaccaagggccagtgtggcacctgcaccaacaccacctccgacgactgcattctgcccagcggggagatcgtctccaactgtgaggctgcggctgaccagtggctggtgaacgacccctccaagccacactgcccccacagcagctccacgaccaagcgcccggccgtcactgtgcccgggggcggtaaaacgaccccacacaaggactgcaccccatctcccctctgccagctcatcaaggacagcctgtttgcccagtgccacgcactggtgcccccgcagcactactacgatgcctgcgtgttcgacagctgcttcatgccgggctcgagcctggagtgcgccagtctgcaggcctacgcagccctctgtgcccagcagaacatctgcctcgactggcggaaccacacgcatggggcctgcttggtggagtgcccatctcacagggagtaccaggcctgtggccctgcagaagagcccacgtgcaaatccagctcctcccagcagaacaacacagtcctggtggaaggctgcttctgtcctgagggcaccatgaactacgctcctggctttgatgtctgcgtgaagacctgcggctgtgtgggacctgacaatgtgcccagagagtttggggagcacttcgagttcgactgcaagaactgtgtctgcctggagggtggaagtggcatcatctgccaacccaagaggtgcagccagaagcccgttacccactgcgtggaagacggcacctacctcgccacggaggtcaaccctgccgacacctgctgcaacattaccgtctgcaagtgcaacaccagcctgtgcaaagagaagccctccgtgtgcccgctgggattcgaagtgaagagcaagatggtgcctggaaggtgctgtcccttctactggtgtgagtccaagggggtgtgtgttcacgggaatgctgagtaccagcccggttctccagtttattcctccaagtgccaggactgcgtgtgcacggacaaggtggacaacaacaccctgctcaacgtcatcgcctgcacccacgtgccctgcaacacctcctgcagccctggcttcgaactcatggaggcccccggggagtgctgtaagaagtgtgaacagacgcactgtatcatcaaacggcccgacaaccagcacgtcatcctgaagcccggggacttcaagagcgacccgaagaacaactgcacattcttcagctgcgtgaagatccacaaccagctcatctcgtccgtctccaacatcacctgccccaactttgatgccagcatttgcatcccgggctccatcacattcatgcccaatggatgctgcaagacctgcacccctcgcaatgagaccagggtgccctgctccaccgtccccgtcaccacggaggtttcgtacgccggctgcaccaagaccgtcctcatgaatcattgctccgggtcctgcgggacatttgtcatgtactcggccaaggcccaggccctggaccacagctgctcctgctgcaaagaggagaaaaccagccagcgtgaggtggtcctgagctgccccaatggcggctcgctgacacacacctacacccacatcgagagctgccagtgccaggacaccgtctgcgggctccccaccggcacctcccgccgggcccggcgctcccctaggcatctggggagcgggtgagcggggtgggcacagcccccttcactgccctcgacagctttacctcccccggaccctctgagcctcctaagctcggcttcctctcttcagatatttattgtctgagtctttgttcagtccttgctttccaataataaactcagggggacatgc

SEQ ID NO: 1059 - protein, 440 aa, Homo sapiens [sequence omitted]

SEQ ID NO: 1060 - protein, 230 aa, Homo sapiens
MNEMYLRCDHENQYAQWMAACMLASKGKTMADSSYQPEVLNILSFLRMKNRNSASQVASSLENMDMNPECFVSPRCAKRHKSKQLAARILEAHQNVAQMPLVEAKLRFIQAWQSLPEFGLTYYLVRFKGSKKDDILGVSYNRLIKIDAATGIPVTTWRFTNIKQWNVNWETRQVVIEFDQNVFTAFTCLSADCKIVHEYIGGYIFLSTRSKDQNETLDEDLFHKLTGGQD

SEQ ID NO: 1061 - protein, 311 aa, Homo sapiens
MYVSYLLDKDVSMYPSSVRHSGGLNLAPQNFVSPPQYPDYGGYHVAAAAAAQNLDSAQSPGPSWPAAYGAPLREDWNGYAPGGAAAANAVAHALNGGSPAAAMGYSSPADYHPHHHPHHHPHHPAAAPSCASGLLQTLNPGPPGPAATAAAEQLSPGGQRRNLCEWMRKPAQQSLGSQVKTRTKDKYRVVYTDHQRLELEKEFHYSRYITIRRKAELAATLGLSERQVKIWFQNRRAKERKINKKKLQQQQQQQPPQPPPPPPQPPQPQPGPLRSVPEPLSPVSSLQASVSGSVPGVLGPTGGVLNPTVTQ

SEQ ID NO: 1062 - protein, 237 aa, Homo sapiens
MAGVSACIKYSMFTFNFLFWLCGILILALAIWVRVSNDSQAIFGSEDVGSSSYVAVDILIAVGAIIMILGFLGCCGAIKESRCMLLLFFIGLLLILLLQVATGILGAVFKSKSDRIVNETLYENTKLLSATGESEKQFQEAIIVFQEEFKCCGLVNGAADWGNNFQHYPELCACLDKQRPCQSYNGKQVYKETCISFIKDFLAKNLIIVIGISFGLAVIEILGLVFSMVLYCQIGNK

SEQ ID NO: 1063 - protein, 80 aa, Homo sapiens
MAARALCMLGLVLALLSSSSAEEYVGLSANQCAVPAKDRVDCGYPHVTPKECNNRGCCFDSRIPGVPWCFKPLQEAECTF

SEQ ID NO: 1064 - protein, 323 aa, Homo sapiens
MAYVPAPGYQPTYNPTLPYYQPIPGGLNVGMSVYIQGVASEHMKRFFVNFVVGQDPGSDVAFHFNPRFDGWDKVVFNTLQGGKWGSEERKRSMPFKKGAAFELVFIVLAEHYKVVVNGNPFYEYGHRLPLQMVTHLQVDGDLQLQSINFIGGQPLRPQGPPMMPPYPGPGHCHQQLNSLPTMEGPPTFNPPVPYFGRLQGGLTARRTIIIKGYVPPTGKSFAINFKVGSSGDIALHINPRMGNGTVVRNSLLNGSWGSEEKKITHNPFGPGQFFDLSIRCGLDRFKVYANGQHLFDFAHRLSAFQRVDTLEIQGDVTLSYVQI

SEQ ID NO: 1065 - protein, 957 aa, Homo sapiens
RNRPHTTAFPGSTTMPGVSQESTASHSSPGSTDTTLSPGSTTASSLGPESTTFHSGPGSTETTLLPDNTTASGLLEASTPVHSSTGSPHTTLSPAGSTTRQGESTTFQSWPNSKDTTPAPPTTTSAFVELSTTSHGSPSSTPTTHFSASSTTLGRSEESTTVHSSPVATATTPSPARSTTSGLVEESTTYHSSPGSTQTMHFPESDTTSGRGEESTTSHSSTTHTISSAPSTTSALVEEPTSYHSSPGSTATTHFPDSSTTSGRSEESTASHSNQDATGTIVLPARSTTSVLLGESTTSPISSGSMETTALPGSTTTPGLSEKSTTFHSSPRSPATTLSPASTTSSGVSEESTTSHSRPGSTHTTAFPDSTTTPGLSRHSTTSHSSPGSTDTTLLPASTTTSGPSQESTTSHSSPGSTDTALSPGSTTALSFGQESTTFHSSPGSTHTTLFPDSTTSSGIVEASTRVHSSTGSPRTTLSPASSTSPGLQGESTAFQTHPASTHTTPSTPSTATAPVEESTTYHRSPSSTPTTHFPASSTTSGHSEKSTIFHSSPDASGTTPSSAHSTTSGRGESTTSRISPGSTEITTLPGSTTTPGLSEASTTFYSSPRSPTTTLSPASMTSLGVGEESTTSRSQPGSTHSTVSPASTTTPGLSEESTTVYSSSPGSTETTVFPRSTTTSVRGEEPTTFHSRPASTHTTLFTEDSTTSGLTEESTAFPGSPASTQTGLPATLTTADLGEESTTFPSSSGSTGTTLSPARSTTSGLVGESTPSRLSPSSTETTTLPGSPTTPSLSEKSTTFYTSPRSPDATLSPATTTSSGVSEESSTSHSQPGSTHTTAFPDSTTTSGLSQEPKTSHSSQGSTEATLSPGSTTASSLGQQSTTFHSSPGDTETTLLPDDTITSGLVEASTPTHSSTGSLHTTLTPASSTSAGLQEESTTFQSWPSSSDTTPSPPGP

SEQ ID NO: 1066 - protein, 914 aa, Homo sapiens
MGPFKSSVFILILHLLEGALSNSLIQLNNNGYEGIVVAIDPNVPEDETLIQQIKDMVTQASLYLFEATGKRFYFKNVAILIPETWKTKADYVRPKLETYKNADVLVAESTPPGNDEPYTEQMGNCGEKGERIHLTPDFIAGKKLAEYGPQGKAFVHEWAHLRWGVFDEYNNDEKFYLSNGRIQAVRCSAGITGTNVVKKCQGGSCYTKRCTFNKVTGLYEKGCEFVLQSRQTEKASIMFAQHVDSIVEFCTEQNHNKEAPNKQNQKCNLRSTWEVIRDSEDFKKTTPMTTQPPNPTFSLLQIGQRIVCLVLDKSGSMATGNRLNRLNQAGQLFLLQTVELGSWVGMVTFDSAAHVQSELIQINSGSDRDTLAKRLPAAASGGTSICSGLRSAFTVIRKKYPTDGSEIVLLTDGEDNTISGCFNEVKQSGAIIHTVALGPSAAQELEELSKMTGGLQTYASDQVQNNGLIDAFGALSSGNGAVSQRSIQLESKGLTLQNSQWMNGTVIVDSTVGKDTLFLITWTTQPPQILLWDPSGQKQGGFVVDKNTKMAYLQIPGIAKVGTWKYSLQASSQTLTLTVTSRASNATLPPITVTSKTNKDTSKFPSPLVVYANIRQGASPILRASVTALIESVNGKTVTLELLDNGAGADATKDDGVYSRYFTTYDTNGRYSVKVRALGGVNAARRRVIPQQSGALYIPGWIENDEIQWNPPRPEINKDDVQHKQVCFSRTSSGGSFVASDVPNAPIPDLFPPGQITDLKAEIHGGSLINLTWTAPGDDYDHGTAHKYIIRISTSILDLRDKFNESLQVNTTALIPKEANSEEVFLFKPENITFENGTDLFIAIQAVDKVDLKSEISNIARVSLFIPPQTPPETPSPDETSAPCPNIHINSTIPGIHILKIMWKWIGELQLSIA

SEQ ID NO: 1067 - protein, 585 aa, Homo sapiens
TLSPASMRSSSISGEPTSLYSQAESTHTTAFPASTTTSGLSQESTTFHSKPGSTETTLSPGSITTSSFAQEFTTPHSQPGSALSTVSPASTTVPGLSEESTTFYSSPGSTETTAFSHSNTMSIHSQQSTPFPDSPGFTHTVLPATLTTTDIGQESTAFHSSSDATGTTPLPARSTASDLVGEPTTFYISPSPTYTTLFPASSSTSGLTEESTTFHTSPSFTSTIVSTESLETLAPGLCQEGQIWNGKQCVCPQGYVGYQCLSPLESFPVETPEKLNATLGMTVKVTYRNFTEKMNDASSQEYQNFSTLFKNRMDVVLKGDNLPQYRGVNIRRLLNGSIVVKNDVILEADYTLEYEELFENLAEIVKAKIMNETRTTLLDPDSCRKAILCYSEEDTFVDSSVTPGFDFQEQCTQKAAEGYTQFYYVDVLDGKLACVNKCTKGTKSQMNCNLGTCQLQRSGPRCLCPNTNTHWYWGETCEFNIAKSLVYGIVGAVMAVLLLALIILIILFSLSQRKRHREQYDVPQEWRKEGTPGIFQKTAIWEDQNLRESRFGLENAYNNFRPTLETVDSGTELHIQRPEMVASTV

SEQ ID NO: 1068 - protein, 5179 aa, Homo sapiens
MGLPLARLAAVCLALSLAGGSELQTEGRTRYHGRNVCSTWGNFHYKTFDGDVFRFPGLCDYNFASDCRGSYKEFAVHLKRGPGQAEAPAGVESILLTIKDDTIYLTRHLAVLNGAVVSTPHYSPGLLIEKSDAYTKVYSRAGLTLMWNREDALMLELDTKFRNHTCGLCGDYNGLQSYSEFLSDGVLFSPLEFGNMQKINQPDVVCEDPEEEVAPASCSEHRAECERLLTAEAFADCQDLVPLEPYLRACQQDRCRCPGGDTCVCSTVAEFSRQCSHAGGRPGNWRTATLCPKTCPGNLVYLESGSPCMDTCSHLEVSSLCEEHRMDGCFCPEGTVYDDIGDSGCVPVSQCHCRLHGHLYTPGQEITNDCEQCVCNAGRWVCKDLPCPGTCALEGGSHITTFDGKTYTFHGDCYYVLAKGDHNDSYALLGELAPCGSTDKQTCLKTVVLLADKKKNAVVFKSDGSVLLNQLQVNLPHVTASFSVFRPSSYHIMVSMAIGVRLQVQLAPVMQLFVTLDQASQGQVQGLCGNFNGLEGDDFKTASGLVEATGAGFANTWKAQSTCHDKLDWLDDPCSLNIESANYAEHWCSLLKKTETPFGRCHSAVDPAEYYKRCKYDTCNCQNNEDCLCAALSSYARACTAKGVMLWGWREHVCNKDVGSCPNSQVFLYNLTTCQQTCRSLSEADSHCLEGFAPVDGCGCPDHTFLDEKGRCVPLAKCSCYHRGLYLEAGDVVVRQEERCVCRDGRLHCRQIRLIGQSCTAPKIHMDCSNLTALATSKPRALSCQTLAAGYYHTECVSGCVCPDGLMDDGRGGCVVEKECPCVHNNDLYSSGAKIKVDCNTCTCKRGRWVCTQAVCHGTCSIYGSGHYITFDGKYYDFDGHCSYVAVQDYCGQNSSLGSFSIITENVPCGTTGVTCSKAIKIFMGRTELKLEDKHRVVIQRDEGHHVAYTTREVGQYLVVESSTGIIVIWDKRTTVFIKLAPSYKGTVCGLCGNFDHRSNNDFTTRDHMVVSSELDFGNSWKEAPTCPDVSTNPEPCSLNPHRRSWAEKQCSILKSSVFSICHSKVDPKPFYEACVHDSCSCDTGGDCECFCSAVASYAQECTKEGACVFWRTPDLCPIFCDYYNPPHECEWHYEPCGNRSFETCRTINGIHSNISVSYLEGCYPRCPKDRPIYEEDLKKCVTADKCGCYVEDTHYPPGASVPTEETCKSCVCTNSSQVVCRPEEGKILNQTQDGAFCYWEICGPNGTVEKHFNICSITTRPSTLTTFTTITLPTTPTSFTTTTTTTTPTSSTVLSTTPKLCCLWSDWINEDHPSSGSDDGDREPFDGVCGAPEDIECRSVKDPHLSLEQHGQKVQCDVSVGFICKNEDQFGNGPFGLCYDYKIRVNCCWPMDKCITTPSPPTTTPSPPPTTTTTLPPTTTPSPPTTTTTTPPPTTTPSPPITTTTTPLPTTTPSPPISTTTTPPPTTTPSPPTTTPSPPTTTPSPPTTTTTTPPPTTTPSPPMTTPITPPASTTTLPPTTTPSPPTTTTTTPPPTTTPSPPTTTPITPPTSTTTLPPTTTPSPPPTTTTTPPPTTTPSPPTTTTPSPPTITTTTPPPTTTPSPPTTTTTTPPPTTTPSPPTTTPITPPTSTTTLPPTTTPSPPPTTTTTPPPTTTPSPPTTTTPSPPITTTTTPPPTTTPSSPITTTPSPPTTTMTTPSPTTTPSSPITTTTTPSSTTTPSPPPTTMTTPSPTTTPSPPTTTMTTLPPTTTSSPLTTTPLPPSITPPTFSPFSTTTPTTPCVPLCNWTGWLDSGKPNFHKPGGDTELIGDVCGPGWAANISCRATMYPDVPIGQLGQTVVCDVSVGLICKNEDQKPGGVIPMAFCLNYEINVQCCECVTQPTTMTTTTTENPTPPTTTPITTTTTVTPTPTPTGTQTPTTTPITTTTTVTPTPTPTGTQTPTTTPITTTTTVTPTPTPTGTQTPTTTPITTTTTVTPTPTPTGTQTPTTTPITTTTTVTPTPTPTGTQTPTTTPITTTTTVTPTPTPTGTQTPTTTPITTTTTVTPTPTPTGTQTPTTTPITTTTTVTPTPTPTGTQTPTTTPITTTTTVTPTPTPTGTQTPTTTPITTTTTVTPTPTPTGTQTPTTTPITTTTTVTPTPTPTGTQTPTTTPITTTTTVTPTPTPTGTQTPTTTPITTTTTVTPTPTPTGTQTPTTTPITTTTTVTPTPTPTGTQTPTTTPITTTTTVTPTPTPTGTQTPTTTPITTTTTVTPTPTPTGTQTPTTTPITTTTTVTPTPTPTGTQTPTTTPITTTTTVTPTPTPTGTQTPTTTPITTTTTVTPTPTPTGTQTPTTTPITTTTTVTPTPTPTGTQTPTTTPITTTTTVTPTPTPTGTQTPTTTPITTTTTVTPTPTPTGTQTPTTTPITTTTTVTPTPTPTGTQTPTTTPITTTTTVTPTPTPTGTQTPTTTPITTTTTVTPTPTPTGTQTPTTTPITTTTTVTPTPTPTGTQTPTTTPITTTTTVTPTPTPTGTQTPTTTPITTTTTVTPTPTPTGTQTPTTTPITTTTTVTPTPTPTGTQTPTTTPITTTTTVTPTPTPTGTQTPTTTPITTTTTVTPTPTPTGTQTPTTTPITTTTTVTPTPTPTGTQTPTTTPITTTTTVTPTPTPTGTQTPTTTPITTTTTVTPTPTPTGTQTPTTTPITTTTTVTPTPTPTGTQTPTTTPITTTTTVTPTPTPTGTQTPTTTPITTTTTVTPTPTPTGTQTPTTTPITTTTTVTPTPTPTGTQTPTTTPITTTTTVTPTPTPTGTQTPTTTPITTTTTVTPTPTPTGTQTPTTTPITTTTTVTPTPTPTGTQTPTTTPITTTTTVTPTPTPTGTQTPTTTPITTTTTVTPTPTPTGTQTPTTTPITTTTTVTPTPTPTGTQTPTTTPITTTTTVTPTPTPTGTQTPTTTPITTTTTVTPTPTPTGTQTPTTTPITTTTTVTPTPTPTGTQTPTTTPITTTTTVTPTPTPTGTQTPTTTPITTTTTVTPTPTPTGTQTPTTTPITTTTTVTPTPTPTGTQTPTTTPITTTTTVTPTPTPTGTQTPTTTPITTTTTVTPTPTPTGTQTPTTTPITTTTTVTPTPTPTGTQTPTTTPITTTTTVTPTPTPTGTQTPTTTPITTTTTVTPTPTPTGTQTPTTTPITTTTTVTPTPTPTGTQTPTTTPITTTTTVTPTPTPTGTQTPTTTPITTTTTVTPTPTPTGTQTPTTTPITTTTTVTPTPTPTGTQTPTTTPITTTTTVTPTPTPTGTQTPTTTPITTTTTVTPTPTPTGTQTPTTTPITTTTTVTPTPTPTGTQTPTTTPITTTTTVTPTPTPTGTQTPTTTPITTTTTVTPTPTPTGTQTPTTTPITTTTTVTPTPTPTGTQTPTTTPITTTTTVTPTPTPTGTQTPTTTPITTTTTVTPTPTPTGTQTPTTTPITTTTTVTPTPTPTGTQTPTTTPITTTTTVTPTPTPTGTQTPTTTPITTTTTVTPTPTPTGTQTPTTTPITTTTTVTPTPTPTGTQTPTTTPITTTTTVTPTPTPTGTQTPTTTPITTTTTVTPTPTPTGTQTPTTTPITTTTTVTPTPTPTGTQTPTTTPITTTTTVTPTPTPTGTQTPTTTPITTTTTVTPTPTPTGTQTPTTTPITTTTTVTPTPTPTGTQTPTTTPITTTTTVTPTPTPTGTQTPTTTPITTTTTVTPTPTPTGTQTPTTTPITTTTTVTPTPTPTGTQTPTTTPITTTTTVTPTPTPTGTQTPTTTPITTTTTVTPTPTPTGTQTPTTTPITTTTTVTPTPTPTGTQTPTTTPITTTTTVTPTPTPTGTQTPTTTPITTTTTVTPTPTPTGTQTPTTTPITTTTTVTPTPTPTGTQTPTTTPITTTTTVTPTPTPTGTQTPTTTPITTTTTVTPTPTPTGTQTPTTTPITTTTTVTPTPTPTGTQTPTTTPITTTTTVTPTPTPTGTQTPTTTPITTTTTVTPTPTPTGTQTPTTTPITTTTTVTPTPTPTGTQTPTTTPITTTTTVTPTPTPTGTQTPTTTPITTTTTVTPTPTPTGTQTPTTTPITTTTTVTPTPTPTGTQTPTTTPITTTTTVTPTPTPTGTQTPTTTPITTTTTVTPTPTPTGTQTPTTTPITTTTTVTPTPTPTGTQTPTTTPITTTTTVTPTPTPTGTQTPTTTPITTTTTVTPTPTPTGTQTGPPTHTSTAPIAELTTSNPPPESSTPQTSRSTSSPLTESTTLLSTLPPAIEMTSTAPPSTPTAPTTTSGGHTLSPPPSTTTSPPGTPTRGTTTGSSSAPTPSTVQTTTTSAWTPTPTPLSTPSIIRTTGLRPYPSSVLICCVLNDTYYAPGEEVYNGTYGDTCYFVNCSLSCTLEFYNWSCPSTPSPTPTPSKSTPTPSKPSSTPSKPTPGTKPPECPDFDPPRQENETWWLCDCFMATCKYNNTVEIVKVECEPPPMPTCSNGLQPVRVEDPDGCCWHWECDCYCTGWGDPHYVTFDGLYYSYQGNCTYVLVEEISPSVDNFGVYIDNYHCDPNDKVSCPRTLIVRHETQEVLIKTVHMMPMQVQVQVNRQAVALPYKKYGLEVYQSGINYVVDIPELGVLVSYNGLSFSVRLPYHRFGNNTKGQCGTCTNTTSDDCILPSGEIVSNCEAAADQWLVNDPSKPHCPHSSSTTKRPAVTVPGGGKTTPHKDCTPSPLCQLIKDSLFAQCHALVPPQHYYDACVFDSCFMPGSSLECASLQAYAALCAQQNICLDWRNHTHGACLVECPSHREYQACGPAEEPTCKSSSSQQNNTVLVEGCFCPEGTMNYAPGFDVCVKTCGCVGPDNVPREFGEHFEFDCKNCVCLEGGSGIICQPKRCSQKPVTHCVEDGTYLATEVNPADTCCNITVCKCNTSLCKEKPSVCPLGFEVKSKMVPGRCCPFYWCESKGVCVHGNAEYQPGSPVYSSKCQDCVCTDKVDNNTLLNVIACTHVPCNTSCSPGFELMEAPGECCKKCEQTHCIIKRPDNQHVILKPGDFKSDPKNNCTFFSCVKIHNQLISSVSNITCPNFDASICIPGSITFMPNGCCKTCTPRNETRVPCSTVPVTTEVSYAGCTKTVLMNHCSGSCGTFVMYSAKAQALDHSCSCCKEEKTSQREVVLSCPNGGSLTHTYTHIESCQCQDTVCGLPTGTSRRARRSPRHLGSG

SEQ ID NO: 1069 - DNA, 1173 bp, Homo sapiens
cagccagagacaggggaggagggaagaaggatactgtggaaagggatggcggggcaaacatttagagctagaagccacgactgggaccactggagacactgaagaaggcaggggcccttagagtcttggttgccaaacagatttgcagatcaaggagaacccaggagtttcaaagaagcgctagtaaggtctctgagatccttgcactagctacatcctcagggtaggaggaagatggcttccagaagcatgcggctgctcctattgctgagctgcctggccaaaacaggagtcctgggtgatatcatcatgagacccagctgtgctcctggatggttttaccacaagtccaattgctatggttacttcaggaagctgaggaactggtctgatgccgagctcgagtgtcagtcttacggaaacggagcccacctggcatctatcctgagtttaaaggaagccagcaccatagcagagtacataagtggctatcagagaagccagccgatatggattggcctgcacgacccacagaagaggcagcagtggcagtggattgatggggccatgtatctgtacagatcctggtctggcaagtccatgggtgggaacaagcactgtgctgagatgagctccaataacaactttttaacttggagcagcaacgaatgcaacaagcgccaacacttcctgtgcaagtaccgaccatagagcaagaatcaagattctgctaactcctgcacagccccgtcctcttcctttctgctagcctggctaaatctgctcattatttcagaggggaaacctagcaaactaagagtgataagggccctactacactggcttttttaggcttagagacagaaactttagcattggcccagtagtggcttctagctctaaatgtttgccccgccatccctttccacagtatccttcttccctcctcccctgtctctggctgtctcgagcagtctagaagagtgcatctccagcctatgaaacagctgggtctttggccataagaagtaaagatttgaagacagaaggaagaaactcaggagtaagcttctagcccccttcagcttctacacccttctgccctctctccattgcctgcaccccaccccagccactcaactcctgcttgtttttcctttggccatgggaaag

SEQ ID NO: 1070 - protein, 158 aa, Homo sapiens
MASRSMRLLLLLSCLAKTGVLGDIIMRPSCAPGWFYHKSNCYGYFRKLRNWSDAELECQSYGNGAHLASILSLKEASTIAEYISGYQRSQPIWIGLHDPQKRQQWQWIDGAMYLYRSWSGKSMGGNKHCAEMSSNNNFLTWSSNECNKRQHFLCKYRP

SEQ ID NO: 1071 - DNA, 1114 bp, Homo sapiens
gcacgaggccaaacagatttgcagatcaaggagaacccaggagtttcaaagaagcgctagtaaggtctctgagatccttgcactagctacatcctcagggtaggaggaagatggcttccagaagcatgcggctgctcctattgctgagctgcctggccaaaacaggagtcctgggtgatatcatcatgagacccagctgtgctcctggatggttttaccacaagtccaattgctatggttacttcaggaagctgaggaactggtctgatgccgagctcgagtgtcagtcttacggaaacggagcccacctggcatctatcctgagtttaaaggaagccagcaccatagcagagtacataagtggctatcagagaagccagccgatatggattggcctgcacgacccacagaagaggcagcagtggcagtggattgatggggccatgtatctgtacagatcctggtctggcaagtccatgggtgggaacaagcactgtgctgagatgagctccaataacaactttttaacttggagcagcaacgaatgcaacaagcgccaacacttcctgtgcaagtaccgaccatagagcaagaatcaagattctgctaactcctgcacagccccgtcctcttcctttctgctagcctggctaaatctgctcattatttcagaggggaaacctagcaaactaagagtgataagggccctactacactggcttttttaggcttagagacagaaactttagcattggcccagtagtggcttctagctctaaatgtttgccccgccatccctttccacagtatccttcttccctcctcccctgtctctggctgtctcgagcagtctagaagagtgcatctccagcctatgaaacagctgggtctttggccataagaagtaaagatttgaagacagaaggaagaaactcaggagtaagcttctagaccccttcagcttctacacccttctgccctctctccattgcctgcaccccaccccagccactcaactcctgcttgtttttcctttggccataggaaggtttaccagtagaatccttgctaggttgatgtgggccatacattcctttaataaaccattgtgtac

SEQ ID NO: 1072 - DNA, 1152 bp, Homo sapiens
actggagacactgaagaaggcaggggcccttagagtcttggttgccaaacagatttgcagatcaaggagaacccaggagtttcaaagaagcgctagtaaggtctctgagatccttgcactagctacatcctcagggtaggaggaagatggcttccagaagcatgcggctgctcctattgctgagctgcctggccaaaacaggagtcctgggtgatatcatcatgagacccagctgtgctcctggatggttttaccacaagtccaattgctatggttacttcaggaagctgaggaactggtctgatgccgagctcgagtgtcagtcttacggaaacggagcccacctggcatctatcctgagtttaaaggaagccagcaccatagcagagtacataagtggctatcagagaagccagccgatatggattggcctgcacgacccacagaagaggcagcagtggcagtggattgatggggccatgtatctgtacagatcctggtctggcaagtccatgggtgggaacaagcactgtgctgagatgagctccaataacaactttttaacttggagcagcaacgaatgcaacaagcgccaacacttcctgtgcaagtaccgaccatagagcaagaatcaagattctgctaactcctgcacagccccgtcctcttcctttctgctagcctggctaaatctgctcattatttcagaggggaaacctagcaaactaagagtgataagggccctactacactggcttttttaggcttagagacagaaactttagcattggcccagtagtggcttctagctctaaatgtttgccccgccatccctttccacagtatccttcttccctcctcccctgtctctggctgtctcgagcagtctagaagagtgcatctccagcctatgaaacagctgggtctttggccataagaagtaaagatttgaagacagaaggaagaaactcaggagtaagcttctagcccccttcagcttctacacccttctgccctctctccattgcctgcaccccaccccagccactcaactcctgcttgtttttcctttggccatgggaaggtttaccagtagaatccttgctaggttgatgtgggccatacattcctttaataaaccattgtgtacat

SEQ ID NO: 1073 - DNA, 474 bp, Homo sapiens
atggcttccagaagcatgcggctgctcctattgctgagctgcctggccaaaacaggagtcctgggtgatatcatcatgagacccagctgtgctcctggatggttttaccacaagtccaattgctatggttacttcaggaagctgaggaactggtctgatgccgagctcgagtgtcagtcttacggaaacggagcccacctggcatctatcctgagtttaaaggaagccagcaccatagcagagtacataagtggctatcagagaagccagccgatatggattggcctgcacgacccacagaagaggcagcagtggcagtggattgatggggccatgtatctgtacagatcctggtctggcaagtccatgggtgggaacaagcactgtgctgagatgagctccaataacaactttttaacttggagcagcaacgaatgcaacaagcgccaacacttcctgtgcaagtaccgacca

SEQ ID NO: 1074 - DNA, 1114 bp, Homo sapiens; identical to SEQ ID NO: 1071

SEQ ID NO: 1075 - DNA, 614 bp, Homo sapiens
tgaagaaggcaggggcccttagagtcttggttgccaaacagatttgcagatcaaggagaacccaggagtttcaaagaagcgctagtaaggtctctgagatccttgcactagctacatcctcagggtaggaggaagatggcttccagaagcatgcggctgctcctattgctgagctgcctggccaaaacaggagtcctgggtgatatcatcatgagacccagctgtgctcctggatggttttaccacaagtccaattgctatggttacttcaggaagctgaggaactggtctgatgccgagctcgagtgtcagtcttacggaaacggagcccacctggcatctatcctgagtttaaaggaagccagcaccatagcagagtacataagtggctatcagagaagccagccgatatggattggcctgcacgacccacagaagaggcagcagtggcagtggattgatggggccatgtatctgtacagatcctggtctggcaagtccatgggtgggaacaagcactgtgctgagatgagctccaataacaactttttaacttggagcagcaacgaatgcaacaagcgccaacacttcctgtgcaagtaccgaccatagag

SEQ ID NO: 1076 - DNA, 3345 bp, Homo sapiens
gaattccgtctcgaccactgaatggaagaaaaggacttttaaccaccattttgtgacttacagaaaggaatttgaataaagaaaactatgatacttcaggcccatcttcactccctgtgtcttcttatgctttatttggcaactggatatggccaagaggggaagtttagtggacccctgaaacccatgacattttctatttatgaaggccaagaaccgagtcaaattatattccagtttaaggccaatcctcctgctgtgacttttgaactaactggggagacagacaacatatttgtgatagaacgggagggacttctgtattacaacagagccttggacagggaaacaagatctactcacaatctccaggttgcagccctggacgctaatggaattatagtggagggtccagtccctatcaccatagaagtgaaggacatcaacgacaatcgacccacgtttctccagtcaaagtacgaaggctcagtaaggcagaactctcgcccaggaaagcccttcttgtatgtcaatgccacagacctggatgatccggccactcccaatggccagctttattaccagattgtcatccagcttcccatgatcaacaatgtcatgtactttcagatcaacaacaaaacgggagccatctctcttacccgagagggatctcaggaattgaatcctgctaagaatccttcctataatctggtgatctcagtgaaggacatgggaggccagagtgagaattccttcagtgataccacatctgtggatatcatagtgacagagaatatttggaaagcaccaaaacctgtggagatggtggaaaactcaactgatcctcaccccatcaaaatcactcaggtgcggtggaatgatcccggtgcacaatattccttagttgacaaagagaagctgccaagattcccattttcaattgaccaggaaggagatatttacgtgactcagcccttggaccgagaagaaaaggatgcatatgttttttatgcagttgcaaaggatgagtacggaaaaccactttcatatccgctggaaattcatgtaaaagttaaagatattaatgataatccacctacatgtccgtcaccagtaaccgtatttgaggtccaggagaatgaacgactgggtaacagtatcgggacccttactgcacatgacagggatgaagaaaatactgccaacagttttctaaactacaggattgtggagcaaactcccaaacttcccatggatggactcttcctaatccaaacctatgctggaatgttacagttagctaaacagtccttgaagaagcaagatactcctcagtacaacttaacgatagaggtgtctgacaaagatttcaagaccctttgttttgtgcaaatcaacgttattgatatcaatgatcagatccccatctttgaaaaatcagattatggaaacctgactcttgctgaagacacaaacattgggtccaccatcttaaccatccaggccactgatgctgatgagccatttactgggagttctaaaattctgtatcatatcataaagggagacagtgagggacgcctgggggttgacacagatccccataccaacaccggatatgtcataattaaaaagcctcttgattttgaaacagcagctgtttccaacattgtgttcaaagcagaaaatcctgagcctctagtgtttggtgtgaagtacaatgcaagttcttttgccaagttcacgcttattgtgacagatgtgaatgaagcacctcaattttcccaacacgtattccaagcgaaagtcagtgaggatgtagctataggcactaaagtgggcaatgtgactgccaaggatccagaaggtctggacataagctattcactgaggggagacacaagaggttggcttaaaattgaccacgtgactggtgagatctttagtgtggctccattggacagagaagccggaagtccatatcgggtacaagtggtggccacagaagtaggggggtcttccttaagctctgtgtcagagttccacctgatccttatggatgtgaatgacaaccctcccaggctagccaaggactacacgggcttgttcttctgccatcccctcagtgcacctggaagtctcattttcgaggctactgatgatgatcagcacttatttcggggtccccattttacattttccctcggcagtggaagcttacaaaacgactgggaagtttccaaaatcaatggtactcatgcccgactgtctaccaggcacacagactttgaggagagggcgtatgtcgtcttgatccgcatcaatgatgggggtcggccacccttggaaggcattgtttctttaccagttacattctgcagttgtgtggaaggaagttgtttccggccagcaggtcaccagactgggatacccactgtgggcatggcagttggtatactgctgaccacccttctggtgattggtataattttagcagttgtgtttatccgcataaagaaggataaaggcaaagataatgttgaaagtgctcaagcatctgaagtcaaacctctgagaagctgaatttgaaaaggaatgtttgaatttatatagcaagtgctatttcagcaacaaccatctcatcctattacttttcatctaacgtgcattataattttttaaacagatattccctcttgtcctttaatatttgctaaatatttcttttttgaggtggagtcttgctctgtcgcccaggctggagtacagtggtgtgatcccagctcactgcaacctccgcctcctgggttcacatgattctcctgcctcagcttcctaagtagctgggtttacaggcacccaccaccatgcccagctaatttttgtatttttaatagagacggggtttcgccatttggccaggctggtcttgaactcctgacgtcaagtgatctgcctgccttggtctcccaatacaggcatgaaccactgcacccacctacttagatatttcatgtgctatagacattagagagatttttcatttttccatgacatttttcctctctgcaaatggcttagctacttgtgtttttcccttttggggcaagacagactcattaaatattctgtacattttttctttatcaaggagatatatcagtgttgtctcatagaactgcctggattccatttatgttttttctgattccatcctgtgtccccttcatccttgactcctttggtatttcactgaatttcaaacatttgtcagagaagaaaaaagtgaggactcaggaaaaataaataaataaaagaacagccttttgcggccgcgaattc

SEQ ID NO: 1077 - protein, 158 aa, Homo sapiens; identical to SEQ ID NO: 1070

SEQ ID NO: 1078 - protein, 158 aa, Homo sapiens; identical to SEQ ID NO: 1070

SEQ ID NO: 1079 - protein, 158 aa, Homo sapiens; identical to SEQ ID NO: 1070

SEQ ID NO: 1080 - protein, 158 aa, Homo sapiens; identical to SEQ ID NO: 1070

SEQ ID NO: 1081 - protein, 832 aa, Homo sapiens [sequence omitted]

SEQ ID NO: 1082 - DNA, 265 bp, Homo sapiens
gaaacatggactgccccttaaattttgactgtcctaaaaacctatttctgatttataatatgctgcctgataaagtgacactagatgtaccagctgagtgtttaatcttcccatcacagatcagatttgagcattaacaggtattttcacatacttgacttcaatatgcttaaagtgaggaacaagcaattaagtggggactaaaaatgttggcctttaagcaatttgtcataaatcttcacaataaagaataaatcaatgtttt

SEQ ID NO: 1083 - protein, 44 aa, Homo sapiens
NMDCPLNFDCPKNLFLIYNMLPDKVTLDVPAECLIFPSQIRFEH

SEQ ID NO: 1084 - DNA, 1035 bp, Homo sapiens
atgcatcaccatcaccatcacacggccgcgtccgataacttccagctgtcccagggtgggcagggattcgccattccgatcgggcaggcgatggcgatcgcgggccagatcaagcttcccaccgttcatatcgggcctaccgccttcctcggcttgggtgttgtcgacaacaacggcaacggcgcacgagtccaacgcgtggtcgggagcgctccggcggcaagtctcggcatctccaccggcgacgtgatcaccgcggtcgacggcgctccgatcaactcggccaccgcgatggcggacgcgcttaacgggcatcatcccggtgacgtcatctcggtgacctggcaaaccaagtcgggcggcacgcgtacagggaacgtgacattggccgagggacccccggccgaattcatatgggtacgagtaagcaatgactctcaagcaatttttggttctgaagatgtaggctctagctcctacgttgctgtggacatattgattgctgtaggtgccatcatcatgattctgggcttcctgggatgctgcggtgctataaaagaaagtcgctgcatgcttctgttgtttttcataggcttgcttctgatcctgctcctgcaggtggcgacaggtatcctaggagctgttttcaaatctaagtctgatcgcattgtgaatgaaactctctatgaaaacacaaagcttttgagcgccacaggggaaagtgaaaaacaattccaggaagccataattgtgtttcaagaagagtttaaatgctgcggtttggtcaatggagctgctgattggggaaataattttcaacactatcctgaattatgtgcctgtctagataagcagagaccatgccaaagctataatggaaaacaagtttacaaagagacctgtatttctttcataaaagacttcttggcaaaaaatttgattatagttattggaatatcatttggactggcagttattgagatactgggtttggtgttttctatggtcctgtattgccagatcgggaacaaataa

SEQ ID NO: 1085 - protein, 344 aa, Homo sapiens
MHHHHHHTAASDNFQLSQGGQGFAIPIGQAMAIAGQIKLPTVHIGPTAFLGLGVVDNNGNGARVQRVVGSAPAASLGISTGDVITAVDGAPINSATAMADALNGHHPGDVISVTWQTKSGGTRTGNVTLAEGPPAEFIWVRVSNDSQAIFGSEDVGSSSYVAVDILIAVGAIIMILGFLGCCGAIKESRCMLLLFFIGLLLILLLQVATGILGAVFKSKSDRIVNETLYENTKLLSATGESEKQFQEAIIVFQEEFKCCGLVNGAADWGNNFQHYPELCACLDKQRPCQSYNGKQVYKETCISFIKDFLAKNLIIVIGISFGLAVIEILGLVFSMVLYCQIGNK

SEQ ID NO: 1086 - DNA, 2877 bp, Homo sapiens
atgcatcaccatcaccatcacacggccgcgtccgataacttccagctgtcccagggtgggcagggattcgccattccgatcgggcaggcgatggcgatcgcgggccagatcaagcttcccaccgttcatatcgggcctaccgccttcctcggcttgggtgttgtcgacaacaacggcaacggcgcacgagtccaacgcgtggtcgggagcgctccggcggcaagtctcggcatctccaccggcgacgtgatcaccgcggtcgacggcgctccgatcaactcggccaccgcgatggcggacgcgcttaacgggcatcatcccggtgacgtcatctcggtgacctggcaaaccaagtcgggcggcacgcgtacagggaacgtgacattggccgagggacccccggccgaattctccatggagctcgctagcggatccgcggccgcacaagaggggaagtttagtggacccctgaaacccatgacattttctatttatgaaggccaagaaccgagtcaaattatattccagtttaaggccaatcctcctgctgtgacttttgaactaactggggagacagacaacatatttgtgatagaacgggagggacttctgtattacaacagagccttggacagggaaacaagatctactcacaatctccaggttgcagccctggacgctaatggaattatagtggagggtccagtccctatcaccatagaagtgaaggacatcaacgacaatcgacccacgtttctccagtcaaagtacgaaggctcagtaaggcagaactctcgcccaggaaagcccttcttgtatgtcaatgccacagacctggatgatccggccactcccaatggccagctttattaccagattgtcatccagcttcccatgatcaacaatgtyatgtactttcagatcaacaacaaaacgggagccatctctcttacccgagagggatctcaggaattgaatcctgctaagaatccttcctataatctggtgatctcagtgaaggacatgggaggccagagtgagaattccttcagtgataccacatctgtggatatcatagtgacagagaatatttggaaagcaccaaaacctgtggagatggtggaaaactcaactgatcctcaccccatcaaaatcactcaggtgcggtggaatgatcccggtgcacaatattccttagttgacaaagagaagctgccaagattcccattttcaattgaccaggaaggagatatttacgtgactcagcccttggaccgagaagaaaaggatgcatatgttttttatgcagttgcaaaggatgagtacggaaaaccactttcatatccgctggaaattcatgtaaaagttaaagatattaatgataatccacctacatgtccgtcaccagtaaccgtatttgaggtccaggagaatgaacgactgggtaacagtatcgggacccttactgcacatgacagggatgaagaaaatactgccaacagttttctaaactacaggattgtggagcaaactcccaaacttcccatggatggactcttcctaatccaaacctatgctggaatgttacagttagctaaacagtccttgaagaagcaagatactcctcagtacaacttaacgatagaggtgtctgacaaagatttcaagaccctttgttttgtgcaaatcaacgttattgatatcaatgatcagatccccatctttgaaaaatcagattatggaaacctgactcttgctgaagacacaaacattgggtccaccatcttaaccatccaggccactgatgctgatgagccatttactgggagttctaaaattctgtatcatatcataaagggagacagtgagggacgcctgggggttgacacagatccccataccaacaccggatatgtcataattaaaaagcctcttgattttgaaacagcagctgtttccaacattgtgttcaaagcagaaaatcctgagcctctagtgtttggtgtgaagtacaatgcaagttcttttgccaagttcacgcttattgtgacagatgtgaatgaagcacctcaattttcccaacacgtattccaagcgaaagtcagtgaggatgtagctataggcactaaagtgggcaatgtgactgccaaggatccagaaggtctggacataagctattcactgaggggagacacaagaggttggcttaaaattgaccacgtgactggtgagatctttagtgtggctccattggacagagaagccggaagtccatatcgggtacaagtggtggccacagaagtaggggggtcttccttaagctctgtgtcagagttccacctgatccttatggatgtgaatgacaaccctcccaggctagccaaggactacacgggcttgttcttctgccatcccctcagtgcacctggaagtctcattttcgaggctactgatgatgatcagcacttatttcggggtccccattttacattttccctcggcagtggaagcttacaaaacgactgggaagtttccaaaatcaatggtactcatgcccgactgtctaccaggcacacagactttgaggagagggcgtatgtcgtcttgatccgcatcaatgatgggggtcggccacccttggaaggcattgtttctttaccagttacattctgcagttgtgtggaaggaagttgtttccggccagcaggtcaccagactgggatacccactgtgggcatggcagttggtatactgctgaccacccttctggtgattggtataattttagcagttgtgtttatccgcataaagaaggataaaggcaaagataatgttgaaagtgctcaagcatctgaagtcaaacctctgagaagctga

SEQ ID NO: 1087 - protein, 958 aa, Homo sapiens
MHHHHHHTAASDNFQLSQGGQGFAIPIGQAMAIAGQIKLPTVHIGPTAFLGLGVVDNNGNGARVQRVVGSAPAASLGISTGDVITAVDGAPINSATAMADALNGHHPGDVISVTWQTKSGGTRTGNVTLAEGPPAEFSMELASGSAAAQEGKFSGPLKPMTFSIYEGQEPSQIIFQFKANPPAVTFELTGETDNIFVIEREGLLYYNRALDRETRSTHNLQVAALDANGIIVEGPVPITIEVKDINDNRPTFLQSKYEGSVRQNSRPGKPFLYVNATDLDDPATPNGQLYYQIVIQLPMINNVMYFQINNKTGAISLTREGSQELNPAKNPSYNLVISVKDMGGQSENSFSDTTSVDIIVTENIWKAPKPVEMVENSTDPHPIKITQVRWNDPGAQYSLVDKEKLPRFPFSIDQEGDIYVTQPLDREEKDAYVFYAVAKDEYGKPLSYPLEIHVKVKDINDNPPTCPSPVTVFEVQENERLGNSIGTLTAHDRDEENTANSFLNYRIVEQTPKLPMDGLFLIQTYAGMLQLAKQSLKKQDTPQYNLTIEVSDKDFKTLCFVQINVIDINDQIPIFEKSDYGNLTLAEDTNIGSTILTIQATDADEPFTGSSKILYHIIKGDSEGRLGVDTDPHTNTGYVIIKKPLDFETAAVSNIVFKAENPEPLVFGVKYNASSFAKFTLIVTDVNEAPQFSQHVFQAKVSEDVAIGTKVGNVTAKDPEGLDISYSLRGDTRGWLKIDHVTGEIFSVAPLDREAGSPYRVQVVATEVGGSSLSSVSEFHLILMDVNDNPPRLAKDYTGLFFCHPLSAPGSLIFEATDDDQHLFRGPHFTFSLGSGSLQNDWEVSKINGTHARLSTRHTDFEERAYVVLIRINDGGRPPLEGIVSLPVTFCSCVEGSCFRPAGHQTGIPTVGMAVGILLTTLLVIGIILAVVFIRIKKDKGKDNVESAQASEVKPLRS

SEQ ID NO: 1088 - DNA, 33 bp, Artificial Sequence
  Primer
cgagcgaattcatatgggtacgagtaagcaatg

SEQ ID NO: 1089 - DNA, 33 bp, Artificial Sequence
  Primer
gcgatgcctcgagttatttgttcccgatctggc

SEQ ID NO: 1090 - DNA, 37 bp, Artificial Sequence
  Primer
gcatgcatgcggccgcacaagaggggaagtttagtgg

SEQ ID NO: 1091 - DNA, 37 bp, Artificial Sequence
  Primer
gcgatgcctcgagtcagcttctcagaggtttgacttc

SEQ ID NO: 1092 - DNA, 2864 bp, Homo sapiens
gattaccaagcaagaacagctaaaatgaaagccatcattcatcttactcttcttgctctcctttctgtaaacacagccaccaaccaaggcaactcagctgatgctgtaacaaccacagaaactgcgactagtggtcctacagtagctgcagctgataccactgaaactaatttccctgaaactgctagcaccacagcaaatacaccttctttcccaacagctacttcacctgctccccccataattagtacacatagttcctccacaattcctacacctgctccccccataattagtacacatagttcctccacaattcctatacctactgctgcagacagtgagtcaaccacaaatgtaaattcattagctacctctgacataatcaccgcttcatctccaaatgatggattaatcacaatggttccttctgaaacacaaagtaacaatgaaatgtcccccaccacagaagacaatcaatcatcagggcctcccactggcaccgctttattggagaccagcaccctaaacagcacaggtcccagcaatccttgccaagatgatccctgtgcagataattcgttatgtgttaagctgcataatacaagtttttgcctgtgtttagaagggtattactacaactcttctacatgtaagaaaggaaaggtattccctgggaagatttcagtgacagtatcagaaacatttgacccagaagagaaacattccatggcctatcaagacttgcatagtgaaattactagcttgtttaaagatgtatttggcacatctgtttatggacagactgtaattcttactgtaagcacatctctgtcaccaagatctgaaatgcgtgctgatgacaagtttgttaatgtaacaatagtaacaattttggcagaaaccacaagtgacaatgagaagactgtgactgagaaaattaataaagcaattagaagtagctcaagcaactttctaaactatgatttgacccttcggtgtgattattatggctgtaaccagactgcggatgactgcctcaatggtttagcatgcgattgcaaatctgacctgcaaaggcctaacccacagagccctttctgcgttgcttccagtctcaagtgtcctgatgcctgcaacgcacagcacaagcaatgcttaataaagaagagtggtggggcccctgagtgtgcgtgcgtgcccggctaccaggaagatgctaatgggaactgccaaaagtgtgcatttggctacagtggactcgactgtaaggacaaatttcagctgatcctcactattgtgggcaccatcgctggcattgtcattctcagcatgataattgcattgattgtcacagcaagatcaaataacaaaacgaagcatattgaagaagagaacttgattgacgaagactttcaaaatctaaaactgcggtcgacaggcttcaccaatcttggagcagaagggagcgtctttcctaaggtcaggataacggcctccagagacagccagatgcaaaatccctattcaagacacagcagcatgccccgccctgactattagaatcataagaatgtggaacccgccatggcccccaaccaatgtacaagctattatttagagtgtttagaaagactgatggagaagtgagcaccagtaaagatctggcctccggggtttttcttccatctgacatctgccagcctctctgaatggaagttgtgaatgtttgcaacgaatccagctcacttgctaaataagaatctatgacattaaatgtagtagatgctattagcgcttgtcagagaggtggttttcttcaatcagtacaaagtactgagacaatggttagggttgttttcttaattcttttcctggtagggcaacaagaaccatttccaatctagaggaaagctccccagcattgcttgctcctgggcaaacattgctcttgagttaagtgacctaattcccctgggagacatacgcatcaactgtggaggtccgaggggatgagaagggatacccaccacctttcaagggtcacaagctcactctctgacaagtcagaatagggacactgcttctatccctccaatggagagattctggcaacctttgaacagcccagagcttgcaacctagcctcacccaagaagactggaaagagacatatctctcagctttttcaggaggcgtgcctgggaatccaggaactttttgatgctaattagaaggcctggactaaaaatgtccactatggggtgcactctacagtttttgaaatgctaggaggcagaaggggcagagagtaaaaaacatgacctggtagaaggaagagaggcaaaggaaactgggtggggaggatcaattagagaggaggcacctgggatccaccttcttccttaggtcccctcctccatcagcaaaggagcacttctctaatcatgccctcccgaagactggctgggagaaggtttaaaaacaaaaaatccaggagtaagagccttaggtcagtttgaaattggagacaaactgtctggcaaagggtgcgagagggagcttgtgctcaggagtccagccgtccagcctcggggtgtaggtttctgaggtgtgccattggggcctcagccttctctggtgacagaggctcagctgtggccaccaacacacaaccacacacacacaaccacacacacaaatgggggcaaccacatccagtacaagcttttacaaatgttattagtgtccttttttatttctaatgccttgtcctcttaaaagttattttatttgttattattatttgttcttgactgttaattgtgaatggtaatgcaataaagtgcctttgttagatggtg

SEQ ID NO: 1093 - protein, 512 aa, Homo sapiens
MKAIIHLTLLALLSVNTATNQGNSADAVTTTETATSGPTVAAADTTETNFPETASTTANTPSFPTATSPAPPIISTHSSSTIPTPAPPIISTHSSSTIPIPTAADSESTTNVNSLATSDIITASSPNDGLITMVPSETQSNNEMSPTTEDNQSSGPPTGTALLETSTLNSTGPSNPCQDDPCADNSLCVKLHNTSFCLCLEGYYYNSSTCKKGKVFPGKISVTVSETFDPEEKHSMAYQDLHSEITSLFKDVFGTSVYGQTVILTVSTSLSPRSEMRADDKFVNVTIVTILAETTSDNEKTVTEKINKAIRSSSSNFLNYDLTLRCDYYGCNQTADDCLNGLACDCKSDLQRPNPQSPFCVASSLKCPDACNAQHKQCLIKKSGGAPECACVPGYQEDANGNCQKCAFGYSGLDCKDKFQLILTIVGTIAGIVILSMIIALIVTARSNNKTKHIEEENLIDEDFQNLKLRSTGFTNLGAEGSVFPKVRITASRDSQMQNPYSRHSSMPRPDY

SEQ ID NO: 1094 - DNA, 6410 bp, Homo sapiens
acctgcacagtggcgagaccaaggacccagagagaaaggtgagagtgcagccggggaggctgaggatcggcggagctggaagagtgagggtgaaggcaagaagtagagcacagaagcaaagattttaagaggaaagaagacatctgaacccaacaccaccctaaaccacaggctgcagggttggcatgctccgtgcaagaccagaggcactgatgctcctgggagctcttctgactggatccctgggtccatcgggcagtcaggacgcactctcactgccctgggaagtgcagcgctatgacggctggtttaacaacctgaggcaccacgagcgtggtgctgttggctgccggttgcagcgccgcgtaccagccaattacgccgacggtgtgtatcaggctctggaggagccgcagctgcccaacccgcgccggctcagcaacgcagccacgcggggcatagccggcctgccgtcgctccacaaccgcaccgtactgggggtcttctttggctaccatgttctttccgacgtggtgagcgtggaaacgcccggttgccccgccgagttcctcaacatccgcatcccacctggagaccccgtgttcgaccccgaccagcgcggggacgtggtgctgcccttccagaggagccgctgggaccccgagaccggacggagtcccagcaacccccgggacctggccaaccaggtgacgggctggctggacggcagcgccatctatggctcctcgcactcctggagcgacgcgctgcggagcttctcggggggacagctggcgtcggggcccgaccccgctttcccccgagactcgcagaaccccctgctcatgtgggcggcgcccgaccccgccaccgggcagaacgggccccgggggctgtacgccttcggggcagagagagggaaccgggaacccttcctgcaggcgctgggcctgctctggttccgctaccacaacctgtgggcgcagaggctggcccgccagcacccagactgggaggacgaggagctgttccagcacgcacgcaagagggtcatcgccacctaccagaacatcgctgtgtatgagtggctgcccagcttcctgcagaaaacactcccggagtatacaggataccgtcctttcctagaccccagcatctccccggaatttgtggtggcctctgagcagttcttctctaccatggtgccccctggtgtctacatgagaaatgccagctgtcatttccggaaggtcctgaacaagggttttcaaagctcccaagctctcagggtctgcaacaactactggattcgggagaaccccaatctgaacagtacccaggaggtgaatgagctgctgctgggaatggcctcccagatttcggagttggaggacaacatagtggttgaagatctgagggattactggcctggccctggcaaattctcccgtacagactatgtggccagcagcatccaacgtggccgagatatggggctgcccagctatagccaggccctgctggcctttgggctggacatcccaaggaactggagtgatctcaaccctaatgtggacccccaggtgctggaggccacagctgccctgtacaaccaggacctatcccagctagagctgctccttggcgggctcctggagagccatggggaccctggacccctgttcagtgccattgtcctcgaccagtttgtacggctgcgggatggtgaccgctactggtttgagaacaccaggaatgggctgttctccaagaaggagattgaagacatccgaaataccaccctgcgggacgtgctggtcgctgttatcaacattgaccccagtgccctgcagcccaatgtctttgtctggcataaaggtgcaccctgccctcaacctaagcagctcacaactgacggcctgccccagtgtgcacccctgactgtgcttgacttctttgaaggcagcagccctggttttgccatcaccatcattgctctctgctgccttcccttagtgagtctgcttctctctggagtggtggcctatttccggggccgagaacacaagaagctacaaaagaaactcaaagagagcgtgaagaaggaagcagccaaagatggagtgccagcgatggagtggccaggccccaaggagaggagcagtcccatcatcatccagctgctgtcagacaggtgtctgcaggtcctgaacaggcatctcactgtgctccgtgtggtccagctgcagcctctgcagcaggtcaacctcatcctgtccaacaaccgaggatgccgcaccctgctgctcaagatccctaaggagtatgacctggtgctgctgtttagttctgaagaggaacggggcgcctttgtgcagcagctatgggacttctgcgtgcgctgggctctgggcctccatgtggctgagatgagcgagaaggagctatttaggaaggctgtgacaaagcagcagcgggaacgcatcctggagatcttcttcagacacctttttgctcaggtgctggacatcaaccaggccgacgcagggaccctgcccctggactcctcccagaaggtgcgggaggccctgacctgcgagctgagcagggccgagtttgccgagtccctgggcctcaagccccaggacatgtttgtggagtccatgttctctctggctgacaaggatggcaatggctacctgtccttccgagagttcctggacatcctggtggtcttcatgaaaggctccccagaggataagtcccgtctaatgtttaccatgtatgacctggatgagaatggcttcctctccaaggacgaattcttcaccatgatgcgatccttcatcgagatctccaacaactgcctgtccaaggcccagctggccgaggtggtggagtctatgttccgggagtcgggattccaggacaaggaggagctgacatgggaggattttcacttcatgctgcgggaccatgacagcgagctccgcttcacgcagctctgtgtcaaaggtggaggtggaggtggaaatggtattagagatatctttaaacaaaacatcagctgtcgagtctcgttcatcactcggacacctggggagcgctcccacccccagggactggggccccctgccccagaagccccagagctgggaggccctggactgaagaagaggtttggcaaaaaggcagcagtgcccactccccggctgtacacagaggcgctgcaagagaagatgcagcgaggcttcctagcccaaaagctgcagcagtacaagcgcttcgtggagaactaccggaggcacatcgtgtgtgtggcaatcttctcggccatctgtgttggcgtgtttgcagatcgtgcttactactatggctttgccttgccaccctcggacattgcacagaccaccctcgtgggcatcatcctgtcacgaggcacggcggccagcgtctccttcatgttctcttatatcttgctcaccatgtgccgcaacctcataaccttcctgcgagagactttcctcaaccgctatgtgccttttgatgccgcagtggacttccaccgctggatcgccatggctgctgttgtcctggccattttgcacagtgctggccacgcagtcaatgtctacatcttctcagtcagcccactcagcctgctggcctgcatattccccaacgtctttgtgaatgatgggtccaagcttccccagaagttctattggtggttcttccagaccgtcccaggtatgacaggtgtgcttctgctcctggtcctggccatcatgtatgtcttcgcctcccaccacttccgccgccgcagcttccggggcttctggctgacccaccacctctacatcctgctctatgccctgctcatcatccatggcagctatgctctgatccagctgcccactttccacatctacttcctggtcccggcaatcatctatggaggtgacaagctggtgagcctgagccggaagaaggtggagatcagcgtggtgaaggcggagctgctgccctcaggagtgacctacctgcaattccagaggccccaaggctttgagtacaagtcaggacagtgggtgcggatcgcctgcctggctctggggaccaccgagtaccaccccttcacactgacctccgcgccccatgaggacacactcagcctgcacatccgggcagtggggccctggaccactcgcctcagggagatctactcatccccaaagggcaatggctgtgctggatacccaaagctgtaccttgatggaccgtttggagagggccatcaggagtggcataaatttgaggtgtcagtgttggtgggagggggcattggggtcaccccctttgcctccatcctcaaagacctggtcttcaagtcatccttgggcagccaaatgctgtgtaagaagatctacttcatctgggtgacacggacccagcgtcagtttgagtggctggctgacatcatccaagaggtggaggagaacgaccaccaggacctggtgtctgtgcacatttatgtcacccagctggctgagaagttcgacctcaggaccaccatgctatacatctgcgagcggcacttccagaaagtgctgaaccggagtctgttcacgggcctgcgctccatcacccactttggccgtccccccttcgagcccttcttcaactccctgcaggaggtccacccacaggtgcgcaagatcggggtgttcagctgcggccctccaggaatgaccaagaatgtagagaaggcctgtcagctcgtcaacaggcaggaccgagcccacttcatgcaccactatgagaacttctgagcctgtcctccctggctgctgcttccagtatcctgccttctcttctgtgcacctaagttgcccagccctgctggcaatctctccatcagaatccaccttaggcctcagctggagggctgcagagcccctcccaatattgggagaatattgacccagacaattatacaaatgagaaaaggcaggagactatgttctacaattgcagtgcatgatgattataagtccacctgtttatcaacggcaccattcctgcagccctccagacttcctgcccttagcaagtgcgcaaccagtcaggatctcccaaagaagataaagaccactcctcaccccagctcaagccatggcaggcgtggcaagcaaagtggggaggagacagtccctgcttgtgacaagtgtggaggtgaaaaggtacaatagtgcttgtctccgatagctccccacatctctaattgacttccacaaaatcgatgcgttgctttggtatttgcttggactgacatttgagggaggaggaggctgggatcctctggctgagaatctcctcagagcccagtgcagaagctgtgatgcttagaacctggacagcccgactgcctcaactctgtctccaggtctattccctccagctccaaaaggagcagccctacttctaccccttcccgtccccaaagtgtcagcaactttgaggagggcaccaggaaacaaagatgcctccccagccctgatattcttgatgtcaccagtgatacccactgccctgacccctgggcaggcccctctctgcatctactggagtggtccctgggctctggggctgaaggattccagcctctctgccagatattcagtactcgatctcaattcccctcttccacaagagttgggtgaccagctgtcctagtttgcccaggactctccctgttttagcactgaaagtctcttgccccaggaaaccccatcagtcccaggcagattgggacagctggtcaccttacgcaagagccaggctgaaacatcccctccatactcagctctttaacttttcttttcctttttcatcgggctctttcctaaaaagctgagctgtaaaatattttacatcgaggtataataaataatcatgtacatgttttaccaccacccaggtcaagacatagaatgtttcaacatttccatcaccccagaaactccccttgtacccccttccacttcgtctcccctagctcctagaagcaaccactgatgtgatttctaccaaatccagttttggtcctactaaatatactcttttgagactggcctcttttactcaccataatgcctttgtaattcatccatgctgttgtgtgtatcagcagtttgttccttttcattgctgagtagtattctattgtagagatgtaccacagtttgtttattcttctgttgatggacgtttgggttgtttctaattttgaatgattataaataaaaattctgtgagtgttcttgtaaaaaaaaaaaaaaaaaaaaaaaaaaaaaaaaaaaaaaaaaaaaaaaaaaaaaaaaaaaaaaaaaaaaaaaaaaaaaaaaaaa

SEQ ID NO: 1095 - protein, 1548 aa, Homo sapiens
MLRARPEALMLLGALLTGSLGPSGSQDALSLPWEVQRYDGWFNNLRHHERGAVGCRLQRRVPANYADGVYQALEEPQLPNPRRLSNAATRGIAGLPSLHNRTVLGVFFGYHVLSDVVSVETPGCPAEFLNIRIPPGDPVFDPDQRGDVVLPFQRSRWDPETGRSPSNPRDLANQVTGWLDGSAIYGSSHSWSDALRSFSGGQLASGPDPAFPRDSQNPLLMWAAPDPATGQNGPRGLYAFGAERGNREPFLQALGLLWFRYHNLWAQRLARQHPDWEDEELFQHARKRVIATYQNIAVYEWLPSFLQKTLPEYTGYRPFLDPSISPEFVVASEQFFSTMVPPGVYMRNASCHFRKVLNKGFQSSQALRVCNNYWIRENPNLNSTQEVNELLLGMASQISELEDNIVVEDLRDYWPGPGKFSRTDYVASSIQRGRDMGLPSYSQALLAFGLDIPRNWSDLNPNVDPQVLEATAALYNQDLSQLELLLGGLLESHGDPGPLFSAIVLDQFVRLRDGDRYWFENTRNGLFSKKEIEDIRNTTLRDVLVAVINIDPSALQPNVFVWHKGAPCPQPKQLTTDGLPQCAPLTVLDFFEGSSPGFAITIIALCCLPLVSLLLSGVVAYFRGREHKKLQKKLKESVKKEAAKDGVPAMEWPGPKERSSPIIIQLLSDRCLQVLNRHLTVLRVVQLQPLQQVNLILSNNRGCRTLLLKIPKEYDLVLLFSSEEERGAFVQQLWDFCVRWALGLHVAEMSEKELFRKAVTKQQRERILEIFFRHLFAQVLDINQADAGTLPLDSSQKVREALTCELSRAEFAESLGLKPQDMFVESMFSLADKDGNGYLSFREFLDILVVFMKGSPEDKSRLMFTMYDLDENGFLSKDEFFTMMRSFIEISNNCLSKAQLAEVVESMFRESGFQDKEELTWEDFHFMLRDHDSELRFTQLCVKGGGGGGNGIRDIFKQNISCRVSFITRTPGERSHPQGLGPPAPEAPELGGPGLKKRFGKKAAVPTPRLYTEALQEKMQRGFLAQKLQQYKRFVENYRRHIVCVAIFSAICVGVFADRAYYYGFALPPSDIAQTTLVGIILSRGTAASVSFMFSYILLTMCRNLITFLRETFLNRYVPFDAAVDFHRWIAMAAVVLAILHSAGHAVNVYIFSVSPLSLLACIFPNVFVNDGSKLPQKFYWWFFQTVPGMTGVLLLLVLAIMYVFASHHFRRRSFRGFWLTHHLYILLYALLIIHGSYALIQLPTFHIYFLVPAIIYGGDKLVSLSRKKVEISVVKAELLPSGVTYLQFQRPQGFEYKSGQWVRIACLALGTTEYHPFTLTSAPHEDTLSLHIRAVGPWTTRLREIYSSPKGNGCAGYPKLYLDGPFGEGHQEWHKFEVSVLVGGGIGVTPFASILKDLVFKSSLGSQMLCKKIYFIWVTRTQRQFEWLADIIQEVEENDHQDLVSVHIYVTQLAEKFDLRTTMLYICERHFQKVLNRSLFTGLRSITHFGRPPFEPFFNSLQEVHPQVRKIGVFSCGPPGMTKNVEKACQLVNRQDRAHFMHHYENF

SEQ ID NO: 1096 - DNA, 1109 bp, Homo sapiens
ggcacgagggcagctcttctcacaggaccagccactagcgcagcctcgagcgatggcctatgtccccgcaccgggctaccagcccacctacaacccgacgctgccttactaccagcccatcccgggcgggctcaacgtgggaatgtctgtttacatccaaggagtggccagcgagcacatgaagcggttcttcgtgaactttgtggttgggcaggatccgggctcagacgtcgccttccacttcaatccgcggtttgacggctgggacaaggtggtcttcaacacgttgcagggcgggaagtggggcagcgaggagaggaagaggagcatgcccttcaaaaagggtgccgcctttgagctggtcttcatagtcctggctgagcactacaaggtggtggtaaatggaaatcccttctatgagtacgggcaccggcttcccctacagatggtcacccacctgcaagtggatggggatctgcaacttcaatcaatcaacttcatcggaggccagcccctccggccccagggacccccgatgatgccaccttaccctggtcccggacattgccatcaacagctgaacagcctgcccaccatggaaggacccccaaccttcaacccgcctgtgccatatttcgggaggctgcaaggagggctcacagctcgaagaaccatcatcatcaagggctatgtgcctcccacaggcaagagctttgctatcaacttcaaggtgggctcctcaggggacatagctctgcacattaatccccgcatgggcaacggtaccgtggtccggaacagccttctgaatggctcgtggggatccgaggagaagaagatcacccacaacccatttggtcccggacagttctttgatctgtccattcgctgtggcttggatcgcttcaaggtttacgccaatggccagcacctctttgactttgcccatcgcctctcggccttccagagggtggacacattggaaatccagggtgatgtcaccttgtcctatgtccagatctaatctattcctggggccataactcatgggaaaacagaattatcccctaggactcctttctaagcccctaataaaatgtctgagggtg

SEQ ID NO: 1097 - DNA, 3459 bp, Homo sapiens
cagagggctgctggctggctaagtccctcccgctcccggctctcgcctcactaggagcggctctcggtgcagcgggacagggcgaagcggcctgcgcccacggagcgcgcgacactgcccggaagggaccgccacccttgccccctcagctgcccactcgtgatttccagcggcctccgcgcgcgcacgatgccctcggccaccagccacagcgggagcggcagcaagtcgtccggaccgccaccgccgtcgggttcctccgggagtgaggcggccgcgggagccggggccgccgcgccggcttctcagcaccccgcaaccggcaccggcgctgtccagaccgaggccatgaagcagattctcggggtgatcgacaagaaacttcggaacctggagaagaaaaagggtaagcttgatgattaccaggaacgaatgaacaaaggggaaaggcttaatcaagatcagctggatgccgtttctaagtaccaggaagtcacaaataatttggagtttgcaaaagaattacagaggagtttcatggcactaagtcaagatattcagaaaacaataaagaagacagcacgtcgggagcagcttatgagagaagaagctgaacagaaacgtttaaaaactgtacttgagctacagtatgttttggacaaattgggagatgatgaagtgcggactgacctgaaacaaggtttgaatggagtgccaatattgtccgaagaggagttgtcattgttggatgaattctataagctagtagaccctgaacgggacatgagcttgaggttgaatgaacagtatgaacatgcctccattcacctgtgggacctgctggaagggaaggaaaaacctgtatgtggaaccacctataaagttctaaaggaaattgttgagcgtgtttttcagtcaaactactttgacagcacccacaaccaccagaatgggctgtgtgaggaagaagaggcagcctcagcacctgcagttgaagaccaggtacctgaagctgaacctgagccagcagaagagtacactgagcaaagtgaagttgaatcaacagagtatgtaaatagacagttcatggcagaaacacagttcaccagtggtgaaaaggagcaggtagatgagtggacagttgaaacggttgaggtggtaaattcactccagcagcaacctcaggctgcatccccttcagtaccagagccccactctttgactccagtggctcaggcagatccccttgtgagaagacagcgagtacaagaccttatggcacaaatgcagggtccctataatttcatacaggattcaatgctggattttgaaaatcagacacttgatcctgccattgtatctgcacagcctatgaatccaacacaaaacatggacatgccccagctggtttgccctccagttcattctgaatctagacttgctcagcctaatcaagttcctgtacaaccagaagcgacacaggttcctttggtatcatccacaagtgaggggtacacagcatctcaacccttgtaccagccttctcatgctacagagcaacgaccacagaaggaaccaattgatcagattcaggcaacaatctctttaaatacagaccagactacagcatcatcatcccttcctgctgcgtctcagcctcaagtatttcaggctgggacaagcaaacctttacatagcagtggaatcaatgtaaatgcagctccattccaatccatgcaaacggtgttcaatatgaatgccccagttcctcctgttaatgaaccagaaactttaaaacagcaaaatcagtaccaggccagttataaccagagcttttctagtcagcctcaccaagtagaacaaacagagcttcagcaagaacagcttcaaacagtggttggcacttaccatggttccccagaccagtcccatcaagtgactggtaaccaccagcagcctcctcagcagaacactggatttccacgtagcaatcagccctattacaatagtcgtggtgtgtctcgtggaggctcccgtggtgctagaggcttgatgaatggataccggggccctgccaatggattcagaggaggatatgatggttaccgcccttcattctctaacactccaaacagtggttatacacagtctcagttcagtgctccccgggattactctggctatcaacgggatggatatcagcagaatttcaagcgaggctctgggcagagtggaccacggggagccccacgaggtcgtggagggcccccaagacccaacagagggatgccgcaaatgaacactcagcaagtgaattaatctgattcacaggattatgtttaatcgccaaaaacacactggccagtgtaccataatatgttaccagaagagttattatctatttgttctccctttcaggaaacttattgtaaagggactgttttcatcccataaagacaggactacaattgtcagctttctattacctggatatggaaggaaactatttttactctgcatgttctgtcctaagcgtcatcttgagccttgcacatgatactcagattcctcacccttgcttaggagtaaaacaatatactttacagggtgataataatctccatagttatttgaagtggcttgaaaaaggcaagattgacttttatgacattggataaaatctacaaatcagccctcgagttattcaatgataactgacaaactaaattatttccctagaaaggaagatgaaaggagtggagtgtggtttggcagaacaactgcatttcacagcttttccagttaaattggagcactgaacgttcagatgcataccaaattatgcatgggtcctaatcacacatataaggctggctaccagctttgacacagcactgttcatctggccaaacaactgtggttaaaaacacatgtaaaatgctttttaacagctgatactgtataagacaaagccaagatgcaaaattaggctttgattggcactttttgaaaaatatgcaacaaatatgggatgtaatccggatggccgcttctgtacttaatgtgaaatatttagatacctttttgaacacttaacagtttctttgagacaatgacttttgtaaggattggtactatctatcattccttatgacatgtacattgtctgtcactaatccttggattttgctgtattgtcacctaaattggtacaggtactgatgaaaatctctagtggataatcataacactctcggtcacatgtttttccttcagcttgaaagcttttttttaaaaggaaaagataccaaatgcctgctgctaccacccttttcaattgctatcttttgaaaggcaccagtatgtgttttagattgatttccctgtttcagggaaatcacggacagtagtttcagttctgatggtataagcaaaacaaataaaacgtttataaaagtt

SEQ ID NO: 1098 - DNA, 875 bp, Homo sapiens
cgagcggcacgagccgattcctagccgccgactcacacaaggcaggtgggtgaggaaatccagagttgccatggagaaaattccagtgtcagcattcttgctccttgtggccctctcctacactctggccagagataccacagtcaaacctggagccaaaaaggacacaaaggactctcgacccaaactgccccagaccctctccagaggttggggtgaccaactcatctggactcagacatatgaagaagctctatataaatccaagacaagcaacaaacccttgatgattattcatcacttggatgagtgcccacacagtcaagctttaaagaaagtgtttgctgaaaataaagaaatccagaaattggcagagcagtttgtcctcctcaatctggtttatgaaacaactgacaaacacctttctcctgatggccagtatgtccccaggattatgtttgttgacccatctctgacagttagagccgatatcactggaagatattcaaatcgtctctatgcttacgaacctgcagatacagctctgttgcttgacaacatgaagaaagctctcaagttgctgaagactgaattgtaaagaaaaaaaatctccaagcccttctgtctgtcaggccttgagacttgaaaccagaagaagtgtgagaagactggctagtgtggaagcatagtgaacacactgattaggttatggtttaatgttacaacaactattttttaagaaaaacaagttttagaaatttggtttcaagtgtacatgtgtgaaaacaatattgtatactaccatagtgagccatgattttctaaaaaaaaaaataaatgttttgggggtgttctgttttctcccaaaaaaaaaa

SEQ ID NO: 1099 - DNA, 1987 bp, Homo sapiens
ctcgagagctccgccatggccgctctcacccgggacccccagttccagaagctgcagcaatggtaccgcgagcaccgctccgagctgaacctgcgccgcctcttcgatgccaacaaggaccgcttcaaccacttcagcttgaccctcaacaccaaccatgggcatatcctggtggattactccaagaacctggtgacggaggacgtgatgcggatgctggtggacttggccaagtccaggggcgtggaggccgcccgggagcggatgttcaatggtgagaagatcaactacaccgagggtcgagccgtgctgcacgtggctctgcggaaccggtcaaacacacccatcctggtagacggcaaggatgtgatgccagaggtcaacaaggttctggacaagatgaagtctttctgccagcgtgtccggagcggtgactggaaggggtacacaggcaagaccatcacggacgtcatcaacattggcattgtcggctccgacctgggacccctcatggtgactgaagcccttaagccatactcttcaggaggtccccgcgtctggtatgtctccaacattgatggaactcacattgccaaaaccctggcccagctgaacccggagtcctccctgttcatcattgcctccaagacctttactacccaggagaccatcacgaatgcagagacggcgaaggagtggtttctccaggcggccaaggatccttctgcagtggcgaagcactttgttgccctgtctactaacacaaccaaagtgaaggagtttggaattgaccctcaaaacatgttcgagttctgggattgggtgggaggacgctactcgctgtggtcggccatcggactctccattgccctgcacgtgggttttgacaacttcgagcagctgctctcgggggctcactggatggaccagcacttccgcacgacgcccctggagaagaacgcccccgtcttgctggccctgctgggtatctggtacatcaactgctttgggtgtgagacacacgccatgctgccctatgaccagtacctgcaccgctttgctgcgtacttccagcagggcgacatggagtccaatgggaaatacatcaccaaatctggaacccgtgtggaccaccagacaggccccattgtgtggggggagccagggaccaatggccagcatgctttttaccagctcatccaccaaggcaccaagatgataccctgtgacttcctcatcccggtccagacccagcaccccatacggaagggtctgcatcacaagatcctcctggccaacttcttggcccagacagaggccctgatgaggggaaaatcgacggaggaggcccgaaaggagctccaggctgcgggcaagagtccagaggaccttgagaggctgctgccacataaggtctttgaaggaaatcgcccaaccaactctattgtgttcaccaagctcacaccattcatgcttggagccttggtcgccatgtatgagcacaagatcttcgttcagggcatcatctgggacatcaacagctttgaccagtggggagtggagctgggaaagcagctggctaagaaaatagagcctgagcttgatggcagtgctcaagtgacctctcacgacgcttctaccaatgggctcatcaacttcatcaagcagcagcgcgaggccagagtccaataaactcgtgctcatctgcagcctcctctgtgactcccctttctcttctcgtccctcctccccggagccggcactgcatgttcctggacaccacccagagcaccctctggttgtgggcttggaccacgagcccttagcagggaaggctggtctcccccagcctaacccccagcccctccatgtctatgctccctctgtgttagaattggctgaagtgtttttgtgcagctgacttttctgacccatgttcacgttgttcacatcccatgtagaaaaacaaagatgccacggaggaggt

SEQ ID NO: 1100 - DNA, 401 bp, Homo sapiens
ggcagagcgtcagcaagagtacagagagaaactccaagggctgtgtgatctcctcacccagactgaaaaccgcctaattagtaaccaggaagcctttgtgattggagacggcacggtggagttacagaagtaccagtccaagcaagaggaattacagagagatatgcaaggaagtacacaggcaatggaagaaatagtgcgaaacacagaactctttttaaaagagagcggtgacgagttgtcccaagcggatagagctttgattgagcagaaactgaacgaggtgaagatgaagtgtgcgcagctgaacttaaaggctgagcagtcgagaaaggagttggataaggcagtgactacggccctcaaggaggagactgaaaaggttgcagctgtgaggcagc

SEQ ID NO: 1101 - DNA, 2839 bp, Homo sapiens
gcacgagctgcggctccgctctcgtcgcaacgagatctttcgagatcttctccgcccccgctaccggcgcctcctctgcggccactgagccggagccggcctgagcagcgctctcggttgcagtacccactggaaggacttaggcgctcgcgtggacaccgcaagcccctcagtagcctcggcccaagaggcctgctttccactcgctagccccgccggggtccgtgtcctgtctcggtggccggacccgggcccgagcccgagcagtagccggcgccatgtcggtggtgggcatagacctgggcttccagagctgctacgtcgctgtggcccgcgccggcggcatcgagactatcgctaatgagtatagcgaccgctgcacgccggcttgcatttcttttggtcctaagaatcgttcaattggagcagcagctaaaagccaggtaatttctaatgcaaagaacacagtccaaggatttaaaagattccatggccgagcattctctgatccatttgtggaggcagaaaaatctaaccttgcatatgatattgtgcagttgcctacaggattaacaggtataaaggtgacatatatggaggaagagcgaaattttaccactgagcaagtgactgccatgcttttgtccaaactgaaggagacagccgaaagtgttcttaagaagcctgtagttgactgtgttgtttcggttccttgtttctatactgatgcagaaagacgatcagtgatggatgcaacacagattgctggtcttaattgcttgcgattaatgaatgaaaccactgcagttgctcttgcatatggaatctataagcaggatcttcctgccttagaagagaaaccaagaaatgtagtttttgtagacatgggccactctgcttatcaagtttctgtatgtgcatttaatagaggaaaactgaaagttctggccactgcatttgacacgacattgggaggtagaaaatttgatgaagtgttagtaaatcacttctgtgaagaatttgggaagaaatacaagctagacattaagtccaaaatccgtgcattattacgactctctcaggagtgtgagaaactcaagaaattgatgagtgcaaatgcttcagatctccctttgagcattgaatgttttatgaatgatgttgatgtatctggaactatgaatagaggcaaatttctggagatgtgcaatgatctcttagctagagtggagccaccacttcgtagtgttttggaacaaaccaagttaaagaaagaagatatttatgcagtggagatagttggtggtgctacacgaatccctgcggtaaaagagaagatcagcaaatttttcggtaaagaacttagtacaacattaaatgctgatgaagctgtcactcgaggctgtgcattgcagtgtgccatcttatcgcctgctttcaaagtcagagaattttctatcactgatgtagtaccatatccaatatctctgagatggaattctccagctgaagaagggtcaagtgactgtgaagtcttttccaaaaatcatgctgctcctttctctaaagttcttacattttatagaaaggaacctttcactcttgaggcctactacagctctcctcaggatttgccctatccagatcctgctatagctcagttttcagttcagaaagtcactcctcagtctgatggctccagttcaaaagtgaaagtcaaagttcgagtaaatgtccatggcattttcagtgtgtccagtgcatctttagtggaggttcacaagtctgaggaaaatgaggagccaatggaaacagatcagaatgcaaaggaggaagagaagatgcaagtggaccaggaggaaccacatgttgaagagcaacagcagcagacaccagcagaaaataaggcagagtctgaagaaatggagacctctcaagctggatccaaggataaaaagatggaccaaccaccccaagccaagaaggcaaaagtgaagaccagtactgtggacctgccaatcgagaatcagctattatggcagatagacagagagatgctcaacttgtacattgaaaatgagggtaagatgatcatgcaggataaactggagaaggagcggaatgatgctaagaacgcagtgagggaatatgtgtatgaaatgagagacaagcttagtggtgaatatgagaagtttgtgagtgaagatggtcgtaacagttttactttgaaactggaagatactgaaaattggttgtatgaggatggagaagaccagccaaagcaagtttatgttgataagttggctgaattaaaaaatctaggtcaacctattaagatacgtttccaggaatctgaagaacgaccaaaattatttgaagaactagggaaacagatccaacagtatatgaaaataatcagctctttcaaaaacaaggaggaccagtatgatcatttggatgctgctgacatgacaaaggtagaaaaaagcacaaatgaagcaatggagtggatgaataacaagctaaatctgcagaacaagcagagtttgaccatggatccagttgtcaagtcaaaagagattgaagctaaaattaaggagctgacaagtacttgtagccctataatttcaaagcccaaacccaaagtggaacctccaaaagaggaacaaaaaaatgcagagcagaatggaccagtggatggacaaggagacaacccaggcccccaggctgctgagcagggtacagacacagctgtgccttcggattcagacaagaagcttcctgaaatggacattgattgattccaacacttgtttctattaaaacagactattataaa

SEQ ID NO: 1102 - protein, 840 aa, Homo sapiens
MSVVGIDLGFQSCYVAVARAGGIETIANEYSDRCTPACISFGPKNRSIGAAAKSQVISNAKNTVQGFKRFHGRAFSDPFVEAEKSNLAYDIVQLPTGLTGIKVTYMEEERNFTTEQVTAMLLSKLKETAESVLKKPVVDCVVSVPCFYTDAERRSVMDATQIAGLNCLRLMNETTAVALAYGIYKQDLPALEEKPRNVVFVDMGHSAYQVSVCAFNRGKLKVLATAFDTTLGGRKFDEVLVNHFCEEFGKKYKLDIKSKIRALLRLSQECEKLKKLMSANASDLPLSIECFMNDVDVSGTMNRGKFLEMCNDLLARVEPPLRSVLEQTKLKKEDIYAVEIVGGATRIPAVKEKISKFFGKELSTTLNADEAVTRGCALQCAILSPAFKVREFSITDVVPYPISLRWNSPAEEGSSDCEVFSKNHAAPFSKVLTFYRKEPFTLEAYYSSPQDLPYPDPAIAQFSVQKVTPQSDGSSSKVKVKVRVNVHGIFSVSSASLVEVHKSEENEEPMETDQNAKEEEKMQVDQEEPHVEEQQQQTPAENKAESEEMETSQAGSKDKKMDQPPQAKKAKVKTSTVDLPIENQLLWQIDREMLNLYIENEGKMIMQDKLEKERNDAKNAVREYVYEMRDKLSGEYEKFVSEDGRNSFTLKLEDTENWLYEDGEDQPKQVYVDKLAELKNLGQPIKIRFQESEERPKLFEELGKQIQQYMKIISSFKNKEDQYDHLDAADMTKVEKSTNEAMEWMNNKLNLQNKQSLTMDPVVKSKEIEAKIKELTSTCSPIISKPKPKVEPPKEEQKNAEQNGPVDGQGDNPGPQAAEQGTDTAVPSDSDKKLPEMDID

SEQ ID NO: 1103 - DNA, 2326 bp, Homo sapiens
ccatcctaatacgactcactatagggctcgagcggccgcccgggcaggtacgccctatacaacttggcttcacatacttttacactaactttatatgatttttaaaaactggtctgatcggacttctcgtcctgggacactgtttactggagtctggccggctctccgtgctcctcttggtacctcattttggggagaaccttaaacccactcgagcagataatctccgccttgaccggtgccaccaaagaagccttggaaccatgtggacttttctgggcattgccactttcacctatttttataagaagttcggggacttcatcactttggccaacagggaggtcctgttgtgcgtgctggtgttcctctcgctgggcctggtgctctcctaccgctgtcgccaccgaaacgggggtctcctcgggcgccagcagagcggctcccagttcgccctcttctcggatattctctcaggcctgcctttcattggcttcttctgggccaaatccccccctgaatcagaaaataaggagcagctcgaggccaggaggcgcagaaaaggaaccaatatttcagaaacaagcttaataggaacagctgcctgtacatcaacatcttctcagaatgacccagaagttatcatcgtgggagctggcgtgcttggctctgctttggcagctgtgctttccagagatggaagaaaggtgacagtcattgagagagacttaaaagagcctgacagaatagttggagaattcctgcagccgggtggttatcatgttctcaaagaccttggtcttggagatacagtggaaggtcttgatgcccaggttgtaaatggttacatgattcatgatcaggaaagcaaatcagaggttcagattccttaccctctgtcagaaaacaatcaagtgcagagtggaagagctttccatcacggaagattcatcatgagtctccggaaagcagctatggcagagcccaatgcaaagtttattgaaggtgttgtgttacagttattagaagaagatgatgttgtgatgggagttcagtacaaggataaagagactggagatatcaaggaactccatgctccactgactgttgttgcagatgggcttttctccaagttcaggaaaagcctggtctccaataaagtttctgtatcatctcattttgttggctttcttatgaagaatgcaccacagtttaaagcaaatcatgctgaacttattttagctaacccgagtccagttctcatctaccagatttcatccagtgaaactcgagtacttgttgacattagaggagaaatgccaaggaatttaagagaatacatggttgaaaaaatttacccacaaatacctgatcacctgaaagaaccattcttagaagccactgacaattctcatctgaggttcatgccagcaagcttccttcctccttcatcagtgaagaaacgaggtgttcttcttttgggagacgcatataatatgaggcatccacttactggtggaggaatgactgttgcttttaaagatataaaactatggagaaaactgctaaagggtatccctgacctttatgatgatgcagctattttcgaggccaaaaaatcattttactgggcaagaaaaacatctcattcctttgtcgtgaatatccttgctcaggctctttatgaattattttctgccacagatgattccctgcatcaactaagaaaagcctgttttctttatttcaaacttggtggcgaatgtgttgcgggtcctgttgggctgctttctgtattgtctcctaaccctctagttttaattggacacttctttgctgttgcaatctatgccgtgtatttttgctttaagtcagaaccttggattacaaaacctcgagcccttctcagtagtggtgctgtattgtacaaagcgtgttctgtaatatttcctctaatttactcagaaatgaagtatatggttcattaagcttaaaggggaaccatttgtgaatgaatatttggaacttaccaagtcctaagagacttttggaagaggatatatatagcatagtaccataccacttataaagtggaaactcttggaccaagatttggattaatttgtttttgaagttttttgtatataaatatgtaaatacatgctttaatttgcaatttaaaatgaaggggttaaataagttagacatttaaaagaaatgattgttaccataaattagtgctaatgctgaggagaactacagtttttcttttgaatttagtatttgagatgagttgttgggacatgcaaataaaatgaagaatgaa

SEQ ID NO: 1104 - DNA, 1484 bp, Homo sapiens
tggaagcgcgtgcttttgtttgtgtccctggccatggcgctgcagctctcccgggagcagggaatcaccctgcgcgggagcgccgaaatcgtggccgagttcttctcattcggcatcaacagcattttatatcagcgtggcatatatccatctgaaacctttactcgagtgcagaaatacggactcaccttgcttgtaactactgatcttgagctcataaaatacctaaataatgtggtggaacaactgaaagattggttatacaagtgttcagttcagaaactggttgtagttatctcaaatattgaaagtggtgaggtcctggaaagatggcagtttgatattgagtgtgacaagactgcaaaagatgacagtgcacccagagaaaagtctcagaaagctatccaggatgaaatccgttcagtgatcagacagatcacagctacggtgacatttctgccactgttggaagtttcttgttcatttgatctgctgatttatacagacaaagatttggttgtacctgaaaaatgggaagagtcgggaccacagtttattaccaattctgaggaagtgcgccttcgttcatttactactacaatccacaaagtaaatagcatggtggcctacaaaattcctgtcaatgactgaggatgacatgaggaaaataatgtaattgtaattttgaaatgtggttttcctgaaatcaggtcatctatagttgatatgttttatttcattggttaatttttacatggagaaaaccaaaatgatacttactgaactgtgtgtaattgttccttttatttttttggtacctatttgacttaccatggagttaacatcatgaatttattgcacattgttcaaaaggaaccaggaggtttttttgtcaacattgtgatgtatattcctttgaagatagtaactgtagatggaaaaacttgtgctataaagctagatgctttcctaaatcagatgttttggtcaagtagtttgactcagtataggtagggagatatttaagtataaaatacaacaaaggaagtctaaatattcagaatctttgttaaggtcctgaaagtaactcataatctataaacaatgaaatattgctgtatagctccttttgaccttcatttcatgtatagttttccctattgaatcagtttccaattatttgactttaatttatgtaacttgaacctatgaagcaatggatatttgtactgtttaatgttctgtgatacagaacagattaatactccctttttatcattacagttagctaaaaaattgccaggcagtccacaaaacagaatttgctttaagaccaacccacagagtcagctggagactaacggcgctggggcctgctgggccgggatatagtcgtgtttagctaagtgtcgagagcattaagaagaaagtcctggttggaggcgcaaggcctgcagcaccagctgtggaatccccaataatgt

SEQ ID NO: 1105 - DNA, 1917 bp, Homo sapiens
atttagagccgggtaggggagcgcagcggccagatacctcagcgctacctggcggaactggatttctctcccgcctgccggcctgcctgccacagccggactccgccactccggtagcctcatggctgcaacctgtgagattagcaacatttttagcaactacttcagtgcgatgtacagctcggaggactccaccctggcctctgttccccctgctgccacctttggggccgatgacttggtactgaccctgagcaacccccagatgtcattggagggtacagagaaggccagctggttgggggaacagccccagttctggtcgaagacgcaggttctggactggatcagctaccaagtggagaagaacaagtacgacgcaagcgccattgacttctcacgatgtgacatggatggcgccaccctctgcaattgtgcccttgaggagctgcgtctggtctttgggcctctgggggaccaactccatgcccagctgcgagacctcacttccagctcttctgatgagctcagttggatcattgagctgctggagaaggatggcatggccttccaggaggccctagacccagggccctttgaccagggcagcccctttgcccaggagctgctggacgacggtcagcaagccagcccctaccaccccggcagctgtggcgcaggagccccctcccctggcagctctgacgtctccaccgcagggactggtgcttctcggagctcccactcctcagactccggtggaagtgacgtggacctggatcccactgatggcaagctcttccccagcgatggttttcgtgactgcaagaagggggatcccaagcacgggaagcggaaacgaggccggccccgaaagctgagcaaagagtactgggactgtctcgagggcaagaagagcaagcacgcgcccagaggcacccacctgtgggagttcatccgggacatcctcatccacccggagctcaacgagggcctcatgaagtgggagaatcggcatgaaggcgtcttcaagttcctgcgctccgaggctgtggcccaactatggggccaaaagaaaaagaacagcaacatgacctacgagaagctgagccgggccatgaggtactactacaaacgggagatcctggaacgggtggatggccggcgactcgtctacaagtttggcaaaaactcaagcggctggaaggaggaagaggttctccagagtcggaactgagggttggaactatacccgggaccaaactcacggaccactcgaggcctgcaaaccttcctgggaggacaggcaggccagatggcccctccactggggaatgctcccagctgtgctgtggagagaagctgatgttttggtgtattgtcagccatcgtcctgggactcggagactatggcctcgcctccccaccctcctcttggaattacaagccctggggtttgaagctgactttatagctgcaagtgtatctccttttatctggtgcctcctcaaacccagtctcagacactaaatgcagacaacaccttcctcctgcagacacctggactgagccaaggaggcctggggaggccctaggggagcaccgtgatggagaggacagagcaggggctccagcaccttctttctggactggcgttcacctccctgctcagtgcttgggctccacgggcaggggtcagagcactccctaatttatgtgctatataaatatgtcagatgtacatagagatctattttttctaaaacattcccctccccactcctctcccacagagtgctggactgttccaggccctccagtgggctgatgctgggacccttaggatggggctcccagctcctttctcctgtgaatggaggcagagacctccaataaagtgccttctgggctttttct

SEQ ID NO: 1106 - DNA, 1528 bp, Homo sapiens
cggcgagcgagcaccttcgacgcggtccggggaccccctcgtcgctgtcctcccgacgcggacccgcgtgccccaggcctcgcgctgcccggccggctcctcgtgtcccactcccggcgcacgccctcccgcgagtcccgggcccctcccgcgcccctcttctcggcgcgcgcgcagcatggcgcccccgcaggtcctcgcgttcgggcttctgcttgccgcggcgacggcgacttttgccgcagctcaggaagaatgtgtctgtgaaaactacaagctggccgtaaactgctttgtgaataataatcgtcaatgccagtgtacttcagttggtgcacaaaatactgtcatttgctcaaagctggctgccaaatgtttggtgatgaaggcagaaatgaatggctcaaaacttgggagaagagcaaaacctgaaggggccctccagaacaatgatgggctttatgatcctgactgcgatgagagcgggctctttaaggccaagcagtgcaacggcacctccacgtgctggtgtgtgaacactgctggggtcagaagaacagacaaggacactgaaataacctgctctgagcgagtgagaacctactggatcatcattgaactaaaacacaaagcaagagaaaaaccttatgatagtaaaagtttgcggactgcacttcagaaggagatcacaacgcgttatcaactggatccaaaatttatcacgagtattttgtatgagaataatgttatcactattgatctggttcaaaattcttctcaaaaaactcagaatgatgtggacatagctgatgtggcttattattttgaaaaagatgttaaaggtgaatccttgtttcattctaagaaaatggacctgacagtaaatggggaacaactggatctggatcctggtcaaactttaatttattatgttgatgaaaaagcacctgaattctcaatgcagggtctaaaagctggtgttattgctgttattgtggttgtggtgatagcagttgttgctggaattgttgtgctggttatttccagaaagaagagaatggcaaagtatgagaaggctgagataaaggagatgggtgagatgcatagggaactcaatgcataactatataatttgaagattatagaagaagggaaatagcaaatggacacaaattacaaatgtgtgtgcgtgggacgaagacatctttgaaggtcatgagtttgttagtttaacatcatatatttgtaatagtgaaacctgtactcaaaatataagcagcttgaaactggctttaccaatcttgaaatttgaccacaagtgtcttatatatgcagatctaatgtaaaatccagaacttggactccatcgttaaaattatttatgtgtaacattcaaatgtgtgcattaaatatgcttccacagtaaaatctgaaaaactgatttgtgattgaaagctgcctttctatttacttgagtcttgtacatacatacttttttatgagctatgaaataaaacattttaaactg

SEQ ID NO: 1107 - protein, 574 aa, Homo sapiens
MWTFLGIATFTYFYKKFGDFITLANREVLLCVLVFLSLGLVLSYRCRHRNGGLLGRQQSGSQFALFSDILSGLPFIGFFWAKSPPESENKEQLEARRRRKGTNISETSLIGTAACTSTSSQNDPEVIIVGAGVLGSALAAVLSRDGRKVTVIERDLKEPDRIVGEFLQPGGYHVLKDLGLGDTVEGLDAQVVNGYMIHDQESKSEVQIPYPLSENNQVQSGRAFHHGRFIMSLRKAAMAEPNAKFIEGVVLQLLEEDDVVMGVQYKDKETGDIKELHAPLTVVADGLFSKFRKSLVSNKVSVSSHFVGFLMKNAPQFKANHAELILANPSPVLIYQISSSETRVLVDIRGEMPRNLREYMVEKIYPQIPDHLKEPFLEATDNSHLRFMPASFLPPSSVKKRGVLLLGDAYNMRHPLTGGGMTVAFKDIKLWRKLLKGIPDLYDDAAIFEAKKSFYWARKTSHSFVVNILAQALYELFSATDDSLHQLRKACFLYFKLGGECVAGPVGLLSVLSPNPLVLIGHFFAVAIYAVYFCFKSEPWITKPRALLSSGAVLYKACSVIFPLIYSEMKYMVH

SEQ ID NO: 1108 - protein, 205 aa, Homo sapiens
MALQLSREQGITLRGSAEIVAEFFSFGINSILYQRGIYPSETFTRVQKYGLTLLVTTDLELIKYLNNVVEQLKDWLYKCSVQKLVVVISNIESGEVLERWQFDIECDKTAKDDSAPREKSQKAIQDEIRSVIRQITATVTFLPLLEVSCSFDLLIYTDKDLVVPEKWEESGPQFITNSEEVRLRSFTTTIHKVNSMVAYKIPVND

SEQ ID NO: 1109 - protein, 371 aa, Homo sapiens
MAATCEISNIFSNYFSAMYSSEDSTLASVPPAATFGADDLVLTLSNPQMSLEGTEKASWLGEQPQFWSKTQVLDWISYQVEKNKYDASAIDFSRCDMDGATLCNCALEELRLVFGPLGDQLHAQLRDLTSSSSDELSWIIELLEKDGMAFQEALDPGPFDQGSPFAQELLDDGQQASPYHPGSCGAGAPSPGSSDVSTAGTGASRSSHSSDSGGSDVDLDPTDGKLFPSDGFRDCKKGDPKHGKRKRGRPRKLSKEYWDCLEGKKSKHAPRGTHLWEFIRDILIHPELNEGLMKWENRHEGVFKFLRSEAVAQLWGQKKKNSNMTYEKLSRAMRYYYKREILERVDGRRLVYKFGKNSSGWKEEEVLQSRN

SEQ ID NO: 1110 - protein, 314 aa, Homo sapiens
MAPPQVLAFGLLLAAATATFAAAQEECVCENYKLAVNCFVNNNRQCQCTSVGAQNTVICSKLAAKCLVMKAEMNGSKLGRRAKPEGALQNNDGLYDPDCDESGLFKAKQCNGTSTCWCVNTAGVRRTDKDTEITCSERVRTYWIIIELKHKAREKPYDSKSLRTALQKEITTRYQLDPKFITSILYENNVITIDLVQNSSQKTQNDVDIADVAYYFEKDVKGESLFHSKKMDLTVNGEQLDLDPGQTLIYYVDEKAPEFSMQGLKAGVIAVIVVVVIAVVAGIVVLVISRKKRMAKYEKAEIKEMGEMHRELNA

SEQ ID NO: 1111 - DNA, 1360 bp, Homo sapiens
cgggggttgctccgtccgtgctccgcctcgccatgacttcctacagctatcgccagtcgtcggccacgtcgtccttcggaggcctgggcggcggctccgtgcgttttgggccgggggtcgcttttcgcgcgcccagcattcacgggggctccggcggccgcggcgtatccgtgtcctccgcccgctttgtgtcctcgtcctcctcggggggctacggcggcggctacggcggcgtcctgaccgcgtccgacgggctgctggcgggcaacgagaagctaaccatgcagaacctcaacgaccgcctggcctcctacctggacaaggtgcgcgccctggaggcggccaacggcgagctagaggtgaagatccgcgactggtaccagaagcaggggcctgggccctcccgcgactacagccactactacacgaccatccaggacctgcgggacaagattcttggtgccaccattgagaactccaggattgtcctgcagatcgacaacgcccgtctggctgcagatgacttccgaaccaagtttgagacggaacaggctctgcgcatgagcgtggaggccgacatcaacggcctgcgcagggtgctggatgagctgaccctggccaggaccgacctggagatgcagatcgaaggcctgaaggaagagctggcctacctgaagaagaaccatgaggaggaaatcagtacgctgaggggccaagtgggaggccaggtcagtgtggaggtggattccgctccgggcaccgatctcgccaagatcctgagtgacatgcgaagccaatatgaggtcatggccgagcagaaccggaaggatgctgaagcctggttcaccagccggactgaagaattgaaccgggaggtcgctggccacacggagcagctccagatgagcaggtccgaggttactgacctgcggcgcacccttcagggtcttgagattgagctgcagtcacagctgagcatgaaagctgccttggaagacacactggcagaaacggaggcgcgctttggagcccagctggcgcatatccaggcgctgatcagcggtattgaagcccagctggcggatgtgcgagctgatagtgagcggcagaatcaggagtaccagcggctcatggacatcaagtcgcggctggagcaggagattgccacctaccgcagcctgctcgagggacaggaagatcactacaacaatttgtctgcctccaaggtcctctgaggcagcaggctctggggcttctgctgtcctttggagggtgtcttctgggtagagggatgggaaggaagggacccttacccccggctcttctcctgacctgccaataaaaatttatggtccaaggg

SEQ ID NO: 1112 - DNA, 16382 bp, Homo sapiens
ctgcagccatgggtgccctatggagctggtggatactctgggctggagcaaccctcctgtggggattgacccaggaggcttcagtggacctcaagaacactggcagagaggaattcctcacagccttcctgcagaactatcagctggcctacagcaaggcctacccccgcctccttatctccagtctgtcagagagccccgcttcagtctccatcctcagccaggcagacaacacctcaaagaaggtcacagtgaggcccggggagtcggtcatggtcaacatcagtgccaaggctgagatgataggcagcaagatcttccagcatgcggtggtgatccattctgactatgccatctctgtgcaggcactaaatgccaagcctgacacagcggagctgacactgctgcggcccatccaggccctaggcaccgagtattttgtgctcacaccccccggcacctcagccaggaatgtcaaggagtttgccgtggtggccggtgccgcaggtgcctcggtcagtgtcacgctgaaggggtcagtgacattcaatggcaagttctatccagcaggcgatgtcctaagagtgactctacagccctacaatgtggcccagctacagagctcagtggatctctcggggtcaaaggtcacagctagtagccccgtggctgtcctctctggccacagctgtgcgcagaaacatacgacctgcaaccatgtggttgagcagctgctacccacgtctgcctggggcacccactatgtagtacccacgctggcctcccaatctcgctatgatttggccttcgttgtggccagccaggccacaaagctgacctacaaccatgggggtatcactggctcccgtgggctccaggcaggtgatgtggtagagtttgaggtccggccatcctggccactctacctgtctgcaaatgtgggcatccaggtcctgttgtttggcacaggtgccataaggaatgaagtgacttatgacccctacctggtcctgatcccagatgtggcggcctactgcccagcctatgtggtcaagagtgtaccaggctgtgagggcgtggccctggtagtggcacagacgaaggctatcagcgggctgaccatagatgggcatgcagtgggggccaagctcacctgggaggctgtgccaggcagtgagttctcgtatgctgaagtggagctcggcacagctgacatgatccacacggccgaggccaccaccaacttgggactgctcaccttcgggctggccaaggctataggctacgcaacagctgctgattgcggccggactgtactgtccccagtggagccctcctgcgaaggcatgcagtgcgcagccgggcagcgctgccaggtggtaggcgggaaggccgggtgtgtggcggagtccaccgctgtctgccgcgcccagggcgacccccattacaccaccttcgacggccgtcgctacgacatgatgggcacctgttcgtacacgatggtggagctgtgcagcgaggacgacaccctgcccgccttcagcgtggaggccaagaacgagcaccggggcagccgccgcgtctcctacgtgggcctcgtcactgtgcgcgcctacagccactctgtgtcgctgacccgcggtgaagttggcttcgtcctggttgacaaccagcgctcgcgcctgccagtctccctgagtgagggtcgcctgcgtgtgtaccagagcggaccacgggccgtggtggagctggtctttgggctggtggtcacttatgactgggactgccagctggcactcagcctgcctgcacgcttccaagaccaggtgtgcgggctgtgtggcaactataatggtgacccagcagacgacttcctcacgcctgacggggctctggctcctgacgctgtggagttcgcaagtagctggaagctggatgatggggactacctgtgtgaggatggctgccagaacaactgtcccgcctgcaccccaggccaggcccaacactatgagggcgaccgactctgtggcatgctgaccaagctcgatggccccttcgctgtctgccatgacaccctggaccccaggcccttcctggagcagtgtgtatatgacctgtgtgtggtcggtggggagcggctcagcctgtgccgtggcctcagcgcctatgcccaggcctgtctggagcttggcatctcggttggggactggagatcaccagccaactgccccctgtcctgccctgccaacagccgctatgagctctgcggccctgcttgcccgacctcctgcaacggggctgcggcgccgtccaactgctccgggcgcccctgcgtggagggctgcgtgtgcctcccaggcttcgtggccagcggcggcgcctgcgtgccggcctcgtcgtgtggctgcaccttccagggtctccagctcgctccgggccaggaagtgtgggcggacgagttgtgccaaaggcgctgcacctgcaacggcgccacccatcaggtcacctgccgcgacaagcagagctgcccggcgggtgagcgctgcagcgtccagaacggcctcctgggctgctaccccgatcgcttcgggacctgccaggggtccggggacccacactatgtgagcttcgacggccggcgcttcgacttcatgggcacctgcacgtacctgctggtcggctcatgcggccagaacgcagcgctgcctgccttccgggtgctggtggaaaacgagcatcggggcagccagactgtgagctacacgcgcgccgtgcgggtggaggcccgcggggtgaaggtggccgtgcgccgggagtaccccgggcaagtgctggtggatgacgtccttcagtatctgcccttccaagcagcagatgggcaggtgcaggtgttccgacagggcagggatgccgtcgtgcgcacggactttggcctgactgtcacttatgactggaatgcacgagtgactgccaaggtgcccagcagctatgctgaggccctgtgtggactctgtgggaacttcaacggggacccagctgatgacctggctctgcggggtgggggtcaagctgccaatgcactggcctttgggaacagctggcaagaagagacgaggcccggctgtggagcaactgaaccgggtgactgtcccaagctggactccctggtggcccagcagctgcagagcaagaatgagtgtggaatccttgccgaccccaaggggcccttccgggagtgccatagcaagctggacccccagggtgccgtgcgcgactgtgtctatgaccgctgcctgctgccaggccagtctgggccactgtgtgacgcactggccacctatgctgctgcatgccaggctgctggagccacagtgcacccctggaggagtgaagaactttgcccactgagctgcccaccccacagccactatgaggcgtgttcctacggctgcccgctgtcctgtggagacctcccagtgcccgggggctgtggctcagaatgccatgagggctgcgtgtgcgatgagggctttgcgctcagtggtgagtcctgcctgcccctggcctcctgtggctgcgtacaccagggcacctaccacccaccaggccagaccttctaccctggccccggatgtgattccctttgccactgccaggagggcggcctggtgtcctgtgagtcctccagctgcggaccgcacgaggcctgccagccatccggtggcagcttgggctgtgtggccgtgggctctagcacctgccaggcgtcaggagacccccactacaccaccttcgatggccgccgcttcgacttcatgggcacctgcgtgtatgtgctggctcagacctgcggcacccggcctggcctgcatcggtttgccgtcctgcaggagaacgtggcctggggtaatgggcgagtcagtgtgaccagggtgatcacggtccaggtggcaaacttcaccctgcggctggagcagagacagtggaaggtcacggtgaacggtgtggacatgaagctgcccgtggtgctggccaacggccagatccgtgcctcccagcatggttcagatgttgtgattgagaccgacttcggcctgcgtgtggcctacgaccttgtgtactatgtgcgggtcaccgtccccggaaactactaccagcagatgtgtggcctgtgtgggaactacaacggcgaccccaaggatgacttccagaagcccaatggctcacaggcaggcaacgccaatgagttcggcaactcctgggaggaggtggtgcccgactctccctgcctgccgcccaccccttgcccgccggggagcgaggactgtatccccagccacaagtgtcctcccgagctggagaagaagtatcagaaggaggagttctgtgggctcctctccagccccacagggccactgtcctcctgccacaagctggtggatccccagggtcccttgaaagattgcatctttgatctctgcctgggtggtgggaacctgagcattctctgcagcaacatccatgcctacgtgagtgcttgccaggcggctggaggccacgtggagccctggaggactgaaactttctgtcccatggagtgccctccgaacagtcactacgagctctgtgcggacacctgctccctgggctgctcagctctcagtgcccctccacagtgccaggatgggtgtgctgagggctgccagtgtgactccggcttcctctacaatggccaagcctgcgtgcccatccagcaatgcggctgctaccacaatggtgtctactatgagccggagcagacagtcctcattgacaactgtcggcagcagtgcacgtgccatgcgggtaaaggcatggtgtgccaggaacacagctgcaagccggggcaggtgtgccagccctccggaggcatcctgagctgcgtcaccaaagacccgtgccacggcgtgacatgccggccacaggagacatgcaaggagcagggtggccagggcgtgtgcctgcccaactatgaggccacgtgctggctgtggggcgacccacactaccactccttcgatggccggaagtttgacttccagggcacctgtaactatgtgctggcaacaactggctgcccgggggtcagcacccagggcctgacacccttcaccgtcaccaccaagaaccagaaccggggcaaccctgctgtgtcctacgtgagagtcgtcaccgtggctgccctcggcaccaacatctccatccacaaggacgagatcggcaaagtccgggtgaacggtgtgctcacagccttgcctgtctctgtggccgacgggcggatttcagtgacccagggtgcatcgaaggcactgctggtggctgactttggactgcaagtcagctatgactggaactggcgggtagacgtgacgctgcccagcagctatcatggcgcagtgtgcgggctctgcggtaacatggaccgcaaccccaacaatgaccaggtcttccctaatggcacactggctccctccatacccatctggggcggcagctggcgagccccaggctgggacccactgtgttgggacgaatgtcgggggtcctgcccaacgtgccctgaggaccggttggagcagtacgagggccctggcttctgcggacccctggcccccggcacagggggccctttcaccacctgccatgctcatgtgccacctgagagcttcttcaagggctgtgttctggacgtctgcatgggtggtggggaccgtgacattctttgcaaggctctggcttcctatgtggccgcctgccaggctgctggggttgtcatcgaagactggcgggcacaggttggctgtgagatcacctgcccagaaaacagccactatgaggtctgtggcccaccctgcccggccagctgtccgtcccctgcaccccttacgacgccagccgtatgtgagggcccctgtgtggagggctgccagtgcgacgcgggtttcgtgttaagtgctgaccgctgtgttcccctcaacaacggctgcggctgctgggccaatggcacctaccacgaggcgggcagtgagttttgggctgatggcacctgctcccagtggtgtcgctgcgggcctgggggtggctcgctggtctgcacacctgccagctgtgggctgggtgaagtgtgtggcctcctgccatccggccagcacggctgccagcccgtcagcacagctgagtgccaggcgtggggtgacccccattacgtcactctggatgggcaccgattcaatttccaaggcacctgcgagtacctgctgagtgcaccctgccacggaccacccttgggggctgagaacttcactgtcactgtagccaatgagcaccggggcagccaggctgtcagctacacccgcagtgtcaccctgcaaatctacaaccacagcctgacactgagtgcccgctggccccggaagctacaggtggacggcgtgttcgtcactctgcccttccagctggactcgctcctgcacgcacacctgagcggcgccgacgtggtggtgaccacaacctcagggctctcgctggctttcgacggggacagcttcgtgcgcctgcgcgtgccggcggcgtacgcgggctctctctgtggcttatgcgggaactacaaccaggaccccgcagacgacctgaaggcggtgggcgggaagcccgccggatggcaggtgggcggcgcccagggctgcggggaatgtgtgtccaagccatgcccgtcgccgtgcaccccagagcagcaagagtccttcggcggcccggacgcctgcggcgtgatctccgccaccgacggcccgctggcgccctgccacggccttgtgccgcccgcgcagtacttccagggctgcttgctggacgcctgccaagttcagggccatcctggaggcctctgtcctgcagtggccacctacgtggcagcctgtcaggccgctggggcccagctccgcgagtggaggcggccggacttctgtcccttccagtgccctgcccacagccactacgagctctgcggtgactcctgtcctgggagctgcccgagcctgtcggcacccgagggctgtgagtcggcctgccgtgaaggctgtgtctgcgatgctggcttcgtgctcagtggtgacacgtgtgtacctgtgggccagtgtggctgcctccacgatgaccgctactacccactgggccagaccttctaccctggccctgggtgtgattccctttgccgctgccgggagggcggtgaggtgtcctgtgagccctccagctgcggcccgcatgagacctgccggccatccggtggcagcttgggctgcgtggccgtgggctctaccacctgccaggcgtcgggagatccccactacaccaccttcgatggccgccgcttcgacttcatgggcacctgcgtgtatgtgctggctcagacctgcggcacccggcctggcctacatcggtttgccgtcctgcaggagaacgtggcctggggtaatgggcgagtcagtgtgaccagggtgatcacggtccaggtggcaaacttcaccctgcggctggagcagagacagtggaaggtcacggtgaacggtgtggacatgaagctgcccgtggtgctggccaacggccagatccgtgcctcccagcatggttcagatgttgtgattgagaccgacttcggcctgcgtgtggcctacgaccttgtgtactatgtgcgggtcaccgtccctggaaactactaccagctgatgtgtggcctgtgtgggaactacaacggcgaccccaaggatgacttccagaagcccaatggctcgcaggcaggcaacgccaatgagttcggcaactcctgggaggaggtggtgcccgactctccctgcctgccgccgcccacctgcccgccggggagcgagggctgtatccccagcgaggagtgtcctcccgagctggagaagaagtatcagaaggaggagttctgtgggctcctctccagccccacagggccactgtcctcctgccacaagctggtggatccccagggtcccttgaaagattgcatctttgatctctgcctgggtggtgggaacctgagcattctctgcagcaacatccatgcctacgtgagtgcttgccaggcggctggaggccacgtggagccctggaggaatgaaactttctgtcccatggaatgccctcagaacagtcactacgagctctgtgcggacacctgctccctgggctgctcggctctcagtgcccctctgcagtgcccagatgggtgtgctgagggctgccagtgtgactccggcttcctctacaacggccaagcctgcgtgcccatccagcaatgtggctgctaccacaatggtgcctactatgagccggagcagacagtcctcattgacaactgtcggcagcagtgcacgtgccatgcgggtaaagtcgtggtgtgccaggaacacagctgcaagccggggcaggtgtgccagccctccggaggcatcctgagctgcgtcaccaaagacccgtgccacggcgtgacatgccggccacaggagacatgcaaggagcagggtggccagggtgtgtgcctgcccaactatgaggccacgtgctggctgtggggcgacccacactaccactccttcgatggccggaagtttgacttccagggcacctgtaactatgtgctggcaacaactggctgcccgggggtcagcacccagggcctgacacccttcaccgtcaccaccaagaaccagaaccggggcaaccctgctgtatcctacgtgagagtcgtcaccgtggctgccctcggcaccaacatctccatccacaaggacgagatcggcaaagtccgggtgaacggtgtgctcacagccttgcctgtctccgtggccgacgggcggatttcagtggcccagggtgcatcgaaggcactgctggtggctgactttggactgcaagtcagctatgactggaactggcgggtagacgtgacgctccccagcagctatcatggcgcagtgtgcgggctctgcggtaacatggaccgcaaccccaacaatgaccaggtcttccctaatggcacactggctccctccatacccatctggggcggcagctggcgagccccaggctgggacccactgtgttgggacgaatgtcgggggtcctgcccaacgtgccctgaggaccggttggagcagtacgagggccctggcttctgcggacccctggcccccggcacagggggccctttcaccacctgccatgctcatgtgccacctgagagcttcttcaagggctgtgttctggacgtctgcatgggtggtggggaccatgacattctttgcaaggctctggcttcctacgtggccgcctgccaggccgctggggttgtcatcgaagactggcgggcacaggttggctgtgagatcacctgcccagaaaacagccactatgaggtctgtggcccaccctgcccggccagctgtccgtcccctgcaccccttacgacgccagccgtatgtgagggcccctgtgtggagggctgccagtgcgacgcgggtttcgtgttaagtgctgaccgctgtgttcccctcaacaacggctgcggctgctgggccaatggcacctaccacgaggcgggcagtgagttttgggctgatggcacctgctcccagtggtgtcgctgcgggcctgggggtggctcgctggtctgcacacctgccagctgtgggctgggtgaagtgtgtggcctcctgccatccggccagcacggctgccagcccgtcagcacagctgagtgccaggcgtggggtgacccccattacgtcactctggatgggcaccgattcgatttccaaggcacctgcgagtacctgctgagtgcaccctgccacggaccacccttgggggctgagaacttcactgtcactgtagccaatgagcaccggggcagccaggctgtcagctacacccgcagtgtcaccctgcaaatctacaaccacagcctgacactgagtgcccgctggccccggaagctacaggtggacggcgtgttcgtcactctgcccttccagctggactcgctcctgcacgcacacctgagcggcgccgacgtggtggtgaccacaacctcagggctctcgctggctttcgacggggacagcttcgtgcgcctgcgcgtgccggcggcgtacgcgggctctctctgtggcttatgcgggaactacaaccaggaccccgcagacgacctgaaggcggtgggcgggaagcccgccggatggcaggtgggcggcgcccagggctgcggggaatgtgtgtccaagccatgcccgtcgccgtgcaccccagagcagcaagagtccttcggcggcccggacgcctgcggcgtgatctccgccaccgacggcccgctggcgccctgccacggccttgtgccgcccgcgcagtacttccagggctgcttgctggacgcctgccaagttcagggccatcctggaggcctctgtcctgcagtggccacctacgtggcagcctgtcaggccgctggggcccagctccgcgagtggaggcggccggacttctgtcccttccagtgccctgcccacagccactacgagctctgcggtgactcctgtcctgggagctgcccgagcctgtcggcacccgagggctgtgagtcggcctgccgtgaaggctgtgtctgcgatgctggcttcgtgctcagtggtgacacgtgtgtacctgtgggccagtgtggctgcctccacgatgaccgctactacccactgggccagaccttctaccctggccctgggtgtgattccctttgccgctgccgggagggcggtgaggtgtcctgtgagccctccagctgcggcccgcatgagacctgccggccatccggtggcagcttgggctgcgtggccgtgggctctaccacctgccaggcgtcgggagatccccactacaccaccttcgatggccgccgcttcgacttcatgggcacctgcgtgtatgtgctggctcagacctgcggcacccggcctggcctacatcggtttgccgtcctgcaggagaacgtggcctggggtaatgggcgagtcagtgtgaccagggtgatcacggtccaggtggcaaacttcaccctgcggctggagcagagacagtggaaggtcacggtgaacggtgtggacatgaagctgcccgtggtgctggccaacggccagatccgtgcctcccagcatggttcagatgttgtgattgagaccgacttcggcctgcgtgtggcctacgaccttgtgtactatgtgcgggtcaccgtccctggaaactactaccagctgatgtgtggcctgtgtgggaactacaacggcgaccccaaggatgacttccagaagcccaatggctcgcaggcaggcaacgccaatgagttcggcaactcctgggaggaggtggtgcccgactctccctgcctgccgccgcccacctgcccgccggggagcgagggctgtatccccagcgaggagtgtcctcccgagctggagaagaagtatcagaaggaggagttctgtgggctcctctccagccccacagggccactgtcctcctgccacaagctggtggatccccagggtcccttgaaagattgcatctttgatctctgcctgggtggtgggaacctgagcattctctgcagcaacatccatgcctacgtgagtgcttgccaggcggctggaggccacgtggagccctggaggaatgaaactttctgtcccatggaatgccctcagaacagtcactacgagctctgtgcggacacctgctccctgggctgctcggctctcagtgcccctctgcagtgcccagatgggtgtgctgagggctgccagtgtgactccggcttcctctacaacggccaagcctgcgtgcccatccagcaatgtggctgctaccacaatggtgtctactatgagccggagcagacagtcctcattgacaactgtcggcagcagtgcacgtgccatgtgggtaaagtcgtggtgtgccaggaacacagctgcaagccggggcaggtgtgccagccctccggaggcatcctgagctgcgtcaacaaagacccgtgccacggcgtgacatgccggccacaggagacatgcaaggagcagggtggccagggtgtgtgcctgcccaactatgaggccacgtgctggctgtggggcgacccacactaccactccttcgatggccggaagtttgacttccagggcacctgtaactatgtgctggcaacaactggctgcccgggggtcagcacccagggcctgacacccttcaccgtcaccaccaagaaccagaaccggggcaaccctgctgtatcctacgtgagagtcgtcaccgtggctgccctcggcaccaacatctccatccacaaggacgagatcggcaaagtccgggtgaacggtgtgctcacagccttgcctgtctccgtggccgacgggcggatttcagtggcccagggtgcatcgaaggcactgctggtggctgactttggactgcaagtcagctatgactggaactggcgggtagacgtgacgctccccagcagctatcatggcgcagtgtgcgggctctgcggtaacatggaccgcaaccccaacaatgaccaggtcttccctaatggcacactggctccctccatacccatctggggcggcagctggcgagccccaggctgggacccactgtgttgggacgaatgtcgggggtcctgcccaacgtgccctgaggaccggttggagcagtacgaggggcctggcttctgcggacccctggcatctggcacagggggccccttcaccacctgccatgctcatgtgccacctgagagcttcttcaagggctgtgttctggacgtctgcatgggtggtggggaccatgacattctttgcaaggctctggcttcctacgtggccgcctgccaggccgctggggttgtcatcgaagactggcgggcacaggttggctgtgagatcacctgcccagaaaacagccactatgaggtctgtggcccaccctgcccggccagctgtccgtcccctgcaccccttacgacgccagccgtatgtgagggcccctgtgtggagggctgccagtgcgacgcgggtttcgtgttaagtgctgaccgctgtgttcccctcaacaacggctgcggctgctgggccaatggcacctaccacgaggcgggcagtgagttttgggctgatggcacctgctcccagtggtgtcgctgcgggcctgggggtggctcgctggtctgcacacctgccagctgtgggctgggtgaagtgtgtggcctcctgccatccggccagcacagctgccagcccgtcagcacagctgagtgccaggcgtggggtgacccccattacgtcactctggatgggcaccgattcgatttccaaggcacctgcgagtacctgctgagtgcaccctgccacggaccacccttgggggctgagaacttcactgtcactgtagccaatgagcaccggggcagccaggctgtcagctacacccgcagtgtcaccctgcaaatctacaaccacagcctgacactgagtgcccgctggccccggaagctacaggtcgacggcgtgttcgtggctctgcctttccagctggactcgctcctgcacgcacacctgagcggcgccgacgtggtggtgaccacaacctcagggctctcgctggctttcgatggggacagcttcgtgcgcctgcgcgtgccggcggcgtacgcggcctctctctgtggcttatgcgggaactacaaccaggaccccgcagacgacctgaaggctgtgggcgggaagcccgctggatggcaggtgggcggggcccagggctgcggggaatgtgtgtccaagccatgcccgtcgccgtgcaccccagagcagcaggagtccttcggcggcccggacgcctgcggcgtgatctccgccaccgacggcccgctggcaccctgccacggccttgtgccgcccgcgcagtacttccagggctgcttgctggacgcctgccaagttcagggccatcctggaggcctctgtcctgcagtggctacctacgtggcagcctgtcaggccgctggggcccagctcggcgagtggaggcggccggacttctgtcccttgcagtgccctgcccacagccactatgagctctgcggtgactcctgccctgtgagctgcccgagcctctcagcacccgagggctgtgagtcggcctgccgtgaaggctgtgtctgcgatgctggcttcgtactcagtggtgacacctgcgtacccgtgggccagtgtggctgcctccatgatggccgctactacccactgggcgaggtcttctacccgggccctgagtgtgagcgacgctgtgagtgtgggccaggtggccatgtcacctgccaggagggcgcagcctgtgggccccatgaggagtgccggttagaggatggtgtccaggcctgtcatgccacaggctgtggccgctgcctggccaacgggggcatccactacatcacccttgatggccgtgtctacgacctgcatggctcctgctcctatgtcttggcccaagtctgccacccaaagcctggggacgaggacttttccatcgtgcttgagaagaatgcagctggacatctccaacgcctcctggttactgtggctggccaggttgtgagcctagctcaggggcagcaggtcaccgtggacggcgaggctgtggccctgcctgtggctgtgggccgcgtgcgggtgaccgccgagggccgaaacatggttctgcagacgaccaaggggctgcggcttctctttgatggcgatgcccacctcctcatgtccatccccagccccttccgtggacggctctgtggcctctgtgggaacttcaatggcaactggagtgacgactttgtcctgcccaatggctcagcagcgtccagtgtggagaccttcggggctgcatggcgggtgcccggctcctccaagggctgtggcgagggctgcgggccccaaggctgcccagtgtgcttggcagaggagactgcaccctatgagagcaacgaggcctgcgggcagctccggaacccccagggccccttcgcgacctgccaggcggtgctgagtccctctgagtacttccgccaatgcgtatacgacctgtgcgcgcaaaagggtgacaaagccttcctgtgccgcagcctggcagcctacacggcggcctgtcaggcagctggcgtggccgtgaagccctggaggacagacagcttctgcccgctccattgccccgcccacagccactactccatctgcactcgcacctgccagggatcctgtgcggctctctccggcctcacgggctgcaccacccgctgttttgagggctgtgagtgcgacgaccgcttcctgctttcccagggtgtctgcatccctgtccaagattgtggctgcacccataatggccgatacttgccggtaaactcctccctgctgacctcagactgcagcgagcgctgttcctgttcctcaagctctggcctgacatgccaggccgctggctgcccaccaggccgtgtatgtgaggtcaaggctgaagcccggaactgctgggccacccgtggtctctgtgtcctgtctgtgggtgccaacctcaccacctttgatggggcccgtggtgccaccacctctcctggtgtctatgagctctcttcccgctgcccaggactacagaataccatcccctggtaccgtgtagttgccgaagtccagatctgccatggcaaaacggaggctgtgggccaggtccacatcttcttccaggatgggatggtgacgttgactccaaacaagggtgtgtgggtgaatggtctccgagtggatctcccagctgagaagttagcatctgtgtccgtgagtcgtacacctgatggctccctgctagtccgccagaaggcaggggtccaggtgtggcttggagccaatgggaaggtggctgtgattgtcagcaatgaccatgctgggaaactgtgtggggcctgtggaaactttgacggggaccagaccaatgattggcatgactcccaggagaagccagcgatggagaaatggagagcgcaggacttctccccatgttatggctgatcagtcatccaccaggaacgaagatttcctgaagaagacctggtccctctggaggttgcggtggctgaaggatgcatcatgtgctcctaccctgctctaccgcttttctgggtcacagaggccaaatgtgagagcattgaataaatatcttaagct

SEQ ID NO: 1113 - DNA, 3143 bp, Homo sapiens
gaattcatgtcttacggtcaagggggaggctgccagagggtttgtcactgctgttgctcctccgcctcagcgagtccagcccgggcctagtcggtcgcctgcctttctcatggccgttaccctcaggccgccacagccgccgaccgggagaggcgcgcgccatggcctctggagccgattcaaaaggtgatgatttatcaacagccattctcaaacagaagaaccgacccaatcggttaattgttgatgaagccatcaatgaagataacagcgtggtgtccttgtcccagcccaagatggatgaactgcagttgttccgaggtgacacggtgttgctaaaaggaaagaaaagacgggaagctgtatgcattgttctttctgatgacacgtgttctgatgagaagattcgaatgaatagagttgttcggaataacctccgagttcgcctaggagatgtcatcagcatccagccatgccctgatgtaaagtatggcaaacgtatccacgttctacccatcgatgacacagtggaaggcatcactggcaatctctttgaggtataccttaagccgtacttcctggaagcttatcggcccatccgtaaaggagatatttttcttgtccggggtgggatgcgtgctgtggagttcaaagttgtagagacagatcccagcccttactgtattgttgctccagacacagtgatccactgtgagggggagccaatcaaacgagaggatgaggaggaatccttgaatgaagtaggctatgatgacgtcggtggttgcaggaagcagctagctcagataaaggagatggtggagctgccactgagacatcctgcgctcttcaaggcgattggtgtaaagcctcctcggggaatcttgttgtatgggcctcctgggacagggaagaccctgattgctcgagctgtggcaaatgaaactggagccttcttctttctgatcaatggtcctgaaatcatgagcaaattggctggtgagtctgagagcaaccttcgtaaagcctttgaggaagctgaaaagaatgctcctgctatcatcttcatcgatgagcttgatgccattgcacccaaaagagagaaaactcatggggaagtggagcgtcgcatcgtgtctcagttgttgaccctcatggatggcctaaagcagagagcacatgtgatagttatggcagcaaccaatagacccaacagcattgacccagccctacggcgatttggtcgctttgacagagaggtagatattggaatacctgatgctacaggacgtttggagattcttcagatccataccaagaacatgaaactggcagatgatgtggacttggaacaggtagccaatgagactcatggtcatgttggtgctgatttggcagccctatgttcagaggctgctctgcaggccatccggaaaaaaatggacctcattgacctagaagatgagaccattgatgctgaggtcatgaattccctggcagttactatggatgacttccggtgggctttgagtcaaagcaacccatcagcacttcgggaaactgtggtagaggtgccacaagtaacctgggaagatattggaggcctggaggatgtcaaacgtgagcttcaggagttggttcagtaccccgtggaacatccagacaaattcctcaaatttggcatgactccctccaaaggtgttcttttctatggacctcctggctgtgggaaaaccttactggctaaagccattgctaatgaatgccaggccaacttcatctccatcaagggtcctgagctgcttaccatgtggtttggggaatctgaggccaatgtccgggaaatttttgacaaggcacggcaagctgccccctgtgtactcttctttgatgagttagattcaattgccaaggctcgtggtggtaatattggagatggtggtggagctgctgaccgagtcatcaatcagatcttgacagaaatggatggcatgtctacaaaaaagaatgtgtttatcattggagctaccaacaggcctgacatcattgatcctgctatcctaagacctggccgtctagatcagctcatttatatcccacttcctgatgagaagtcccgtgttgccatcctaaaagccaatctgcgaaagtccccagttgccaaggatgtggatttggagttcctggctaagatgactaatggcttttctggagctgatttgacagaaatttgccaacgggcttgtaaactggccattcgtgaatctattgagagtgagattaggcgagaacgagagaggcagacaaatccatcggctatggaggtagaagaggatgatccagtgcctgagatccgcagagatcactttgaggaagccatgcgttttgcccgacgttctgtgagcgataatgacattcggaagtatgaaatgttcgcccagacactgcagcagagtcgaggttttggcagcttcagattcccttcagggaaccagggtggagctggtcccagccagggcagtggaggtggcacaggtggcagtgtgtacacagaagacaatgacgatgacctgtatggctaagtgatgtgccagcatgcagcgagctggcctggctggaccttgttccctggggagggggcgcttcgcaagagggcccaggggtgtgcccatggcctgctccattcctcagtctgaacagttcagcccagtcagactctggacaggggtttcctgttgcaaaaaaaaaaattacaaaagcgataaaataaaagtgattttcatttgggaggtgaagagtgaattaccagcaaggaattgggtcttgggcccacacggtttctgtcgtagtttggggtggtgcaggtaacctgtgtggtgtgaaccaagcattgccaccaccatcaccacagtaaagcatctatactcaatgctgtccaagtcctctcttaccctagccaacctgggtaggtggatgaggggcctcagtttgctgggtgtttatatagaaagtaggttgatttttattttacatgcttttgagttacgttggaagactaatcataagcagtttctaaaccaaaaaaaagaaaaaaaaaaaaaaagacatgttgtaaaaggacaataaatgttgggtcaaaatgg

SEQ ID NO: 1114 - DNA, 3195 bp, Homo sapiens
ctgccactgccacctcgcggatcaggagccagcgttgttcgcccgacgcctcgctgccggtgggaggaagcgagagggaagccgcttgcgggtttgtcgccgctgctcgcccaccgcctggaagagccgagccccggcccagtcggtcgcttgccaccgctcgtagccgttacccgcgggccgccacagccgccggccgggagaggcgcgcgccatggcttctggagccgattcaaaaggtgatgacctatcaacagccattctcaaacagaagaaccgtcccaatcggttaattgttgatgaagccatcaatgaggacaacagtgtggtgtccttgtcccagcccaagatggatgaattgcagttgttccgaggtgacacagtgttgctgaaaggaaagaagagacgagaagctgtttgcatcgtcctttctgatgatacttgttctgatgagaagattcggatgaatagagttgttcggaataaccttcgtgtacgcctaggggatgtcatcagcatccagccatgccctgatgtgaagtacggcaaacgtatccatgtgctgcccattgatgacacagtggaaggcattactggtaatctcttcgaggtataccttaagccgtacttcctggaagcgtatcgacccatccggaaaggagacatttttcttgtccgtggtgggatgcgtgctgtggagttcaaagtggtggaaacagatcctagcccttattgcattgttgctccagacacagtgatccactgcgaaggggagcctatcaaacgagaggatgaggaagagtccttgaatgaagtagggtatgatgacattggtggctgcaggaagcagctagctcagataaaggagatggtggaactgcccctgagacatcctgccctctttaaggcaattggtgtgaagcctcctagaggaatcctgctttacggacctcctggaacaggaaagaccctgattgctcgagctgtagcaaatgagactggagccttcttcttcttgatcaatggtcctgagatcatgagcaaattggctggtgagtctgagagcaaccttcgtaaagcctttgaggaggctgagaagaatgctcctgccatcatcttcattgatgagctagatgccatcgctcccaaaagagagaaaactcatggcgaggtggagcggcgcattgtatcacagttgttgaccctcatggatggcctaaagcagagggcacatgtgattgttatggcagcaaccaacagacccaacagcattgacccagctctacggcgatttggtcgctttgacagggaggtagatattggaattcctgatgctacaggacgcttagagattcttcagatccataccaagaacatgaagctggcagatgatgtggacctggaacaggtagccaatgagactcacgggcatgtgggtgctgacttagcagccctgtgctcagaggctgctctgcaagccatccgcaagaagatggatctcattgacctagaggatgagaccattgatgccgaggtcatgaactctctagcagttactatggatgacttccggtgggccttgagccagagtaacccatcagcactgcgggaaaccgtggtagaggtgccacaggtaacctgggaagacatcgggggcctagaggatgtcaaacgtgagctacaggagctggtccagtatcctgtggagcacccagacaaattcctgaagtttggcatgacaccttccaagggagttctgttctatggacctcctggctgtgggaaaactttgttggccaaagccattgctaatgaatgccaggccaacttcatctccatcaagggtcctgagctgctcaccatgtggtttggggagtctgaggccaatgtcagagaaatctttgacaaggcccgccaagctgccccctgtgtgctattctttgatgagctggattcgattgccaaggctcgtggaggtaacattggagatggtggtggggctgctgaccgagtcatcaaccagatcctgacagaaatggatggcatgtccacaaaaaaaaatgtgttcatcattggcgctaccaaccggcctgacatcattgatcctgccatcctcagacctggccgtcttgatcagctcatctacatcccacttcctgatgagaagtcccgtgttgccatcctcaaggctaacctgcgcaagtccccagttgccaaggatgtggacttggagttcctggctaaaatgactaatggcttctctggagctgacctgacagagatttgccagcgtgcttgcaagctggccatccgtgaatccatcgagagtgagattaggcgagaacgagagaggcagacaaacccatcagccatggaggtagaagaggatgatccagtgcctgagatccgtcgagatcactttgaagaagccatgcgctttgcgcgccgttctgtcagtgacaatgacattcggaagtatgagatgtttgcccagacccttcagcagagtcggggctttggcagcttcagattcccttcagggaaccagggtggagctggccccagtcagggcagtggaggcggcacaggtggcagtgtatacacagaagacaatgatgatgacctgtatggctaagtggtggtggccagcgtgcagtgagctggcctgcctggaccttgttccctgggggtgggggcgcttgcccaggagagggaccaggggtgcgcccacagcctgctccattctccagtctgaacagttcagctacagtctgactctggacagggggtttctgttgcaaaaatacaaaacaaaagcgataaaataaaagcgattttcatttggtaggcggagagtgaattaccaacagggaattgggccttgggcctatgccatttctgttgtagtttggggcagtgcaggggacctgtgtggggtgtgaaccaaggcactactgccacctgccacagtaaagcatctgcacttgactcaatgctgcccgagccctcccttccccctatccaacctgggtaggtgggtaggggccacagttgctggatgtttatatagagagtaggttgatttattttacatgcttttgagttaatgttggaaaactaatcacaagcagtttctaaaccaaaaaatgacatgttgtaaaaggacaataaacgttgggtcaaaatggagcctga

SEQ ID NO: 1115 - protein, 400 aa, Homo sapiens
MTSYSYRQSSATSSFGGLGGGSVRFGPGVAFRAPSIHGGSGGRGVSVSSARFVSSSSSGGYGGGYGGVLTASDGLLAGNEKLTMQNLNDRLASYLDKVRALEAANGELEVKIRDWYQKQGPGPSRDYSHYYTTIQDLRDKILGATIENSRIVLQIDNARLAADDFRTKFETEQALRMSVEADINGLRRVLDELTLARTDLEMQIEGLKEELAYLKKNHEEEISTLRGQVGGQVSVEVDSAPGTDLAKILSDMRSQYEVMAEQNRKDAEAWFTSRTEELNREVAGHTEQLQMSRSEVTDLRRTLQGLEIELQSQLSMKAALEDTLAETEARFGAQLAHIQALISGIEAQLADVRADSERQNQEYQRLMDIKSRLEQEIATYRSLLEGQEDHYNNLSASKVL

SEQ ID NO: 1116 - protein, 5405 aa, Homo sapiens
MGALWSWWILWAGATLLWGLTQEASVDLKNTGREEFLTAFLQNYQLAYSKAYPRLLISSLSESPASVSILSQADNTSKKVTVRPGESVMVNISAKAEMIGSKIFQHAVVIHSDYAISVQALNAKPDTAELTLLRPIQALGTEYFVLTPPGTSARNVKEFAVVAGAAGASVSVTLKGSVTFNGKFYPAGDVLRVTLQPYNVAQLQSSVDLSGSKVTASSPVAVLSGHSCAQKHTTCNHVVEQLLPTSAWGTHYVVPTLASQSRYDLAFVVASQATKLTYNHGGITGSRGLQAGDVVEFEVRPSWPLYLSANVGIQVLLFGTGAIRNEVTYDPYLVLIPDVAAYCPAYVVKSVPGCEGVALVVAQTKAISGLTIDGHAVGAKLTWEAVPGSEFSYAEVELGTADMIHTAEATTNLGLLTFGLAKAIGYATAADCGRTVLSPVEPSCEGMQCAAGQRCQVVGGKAGCVAESTAVCRAQGDPHYTTFDGRRYDMMGTCSYTMVELCSEDDTLPAFSVEAKNEHRGSRRVSYVGLVTVRAYSHSVSLTRGEVGFVLVDNQRSRLPVSLSEGRLRVYQSGPRAVVELVFGLVVTYDWDCQLALSLPARFQDQVCGLCGNYNGDPADDFLTPDGALAPDAVEFASSWKLDDGDYLCEDGCQNNCPACTPGQAQHYEGDRLCGMLTKLDGPFAVCHDTLDPRPFLEQCVYDLCVVGGERLSLCRGLSAYAQACLELGISVGDWRSPANCPLSCPANSRYELCGPACPTSCNGAAAPSNCSGRPCVEGCVCLPGFVASGGACVPASSCGCTFQGLQLAPGQEVWADELCQRRCTCNGATHQVTCRDKQSCPAGERCSVQNGLLGCYPDRFGTCQGSGDPHYVSFDGRRFDFMGTCTYLLVGSCGQNAALPAFRVLVENEHRGSQTVSYTRAVRVEARGVKVAVRREYPGQVLVDDVLQYLPFQAADGQVQVFRQGRDAVVRTDFGLTVTYDWNARVTAKVPSSYAEALCGLCGNFNGDPADDLALRGGGQAANALAFGNSWQEETRPGCGATEPGDCPKLDSLVAQQLQSKNECGILADPKGPFRECHSKLDPQGAVRDCVYDRCLLPGQSGPLCDALATYAAACQAAGATVHPWRSEELCPLSCPPHSHYEACSYGCPLSCGDLPVPGGCGSECHEGCVCDEGFALSGESCLPLASCGCVHQGTYHPPGQTFYPGPGCDSLCHCQEGGLVSCESSSCGPHEACQPSGGSLGCVAVGSSTCQASGDPHYTTFDGRRFDFMGTCVYVLAQTCGTRPGLHRFAVLQENVAWGNGRVSVTRVITVQVANFTLRLEQRQWKVTVNGVDMKLPVVLANGQIRASQHGSDVVIETDFGLRVAYDLVYYVRVTVPGNYYQQMCGLCGNYNGDPKDDFQKPNGSQAGNANEFGNSWEEVVPDSPCLPPTPCPPGSEDCIPSHKCPPELEKKYQKEEFCGLLSSPTGPLSSCHKLVDPQGPLKDCIFDLCLGGGNLSILCSNIHAYVSACQAAGGHVEPWRTETFCPMECPPNSHYELCADTCSLGCSALSAPPQCQDGCAEGCQCDSGFLYNGQACVPIQQCGCYHNGVYYEPEQTVLIDNCRQQCTCHAGKGMVCQEHSCKPGQVCQPSGGILSCVTKDPCHGVTCRPQETCKEQGGQGVCLPNYEATCWLWGDPHYHSFDGRKFDFQGTCNYVLATTGCPGVSTQGLTPFTVTTKNQNRGNPAVSYVRVVTVAALGTNISIHKDEIGKVRVNGVLTALPVSVADGRISVTQGASKALLVADFGLQVSYDWNWRVDVTLPSSYHGAVCGLCGNMDRNPNNDQVFPNGTLAPSIPIWGGSWRAPGWDPLCWDECRGSCPTCPEDRLEQYEGPGFCGPLAPGTGGPFTTCHAHVPPESFFKGCVLDVCMGGGDRDILCKALASYVAACQAAGVVIEDWRAQVGCEITCPENSHYEVCGPPCPASCPSPAPLTTPAVCEGPCVEGCQCDAGFVLSADRCVPLNNGCGCWANGTYHEAGSEFWADGTCSQWCRCGPGGGSLVCTPASCGLGEVCGLLPSGQHGCQPVSTAECQAWGDPHYVTLDGHRFNFQGTCEYLLSAPCHGPPLGAENFTVTVANEHRGSQAVSYTRSVTLQIYNHSLTLSARWPRKLQVDGVFVTLPFQLDSLLHAHLSGADVVVTTTSGLSLAFDGDSFVRLRVPAAYAGSLCGLCGNYNQDPADDLKAVGGKPAGWQVGGAQGCGECVSKPCPSPCTPEQQESFGGPDACGVISATDGPLAPCHGLVPPAQYFQGCLLDACQVQGHPGGLCPAVATYVAACQAAGAQLREWRRPDFCPFQCPAHSHYELCGDSCPGSCPSLSAPEGCESACREGCVCDAGFVLSGDTCVPVGQCGCLHDDRYYPLGQTFYPGPGCDSLCRCREGGEVSCEPSSCGPHETCRPSGGSLGCVAVGSTTCQASGDPHYTTFDGRRFDFMGTCVYVLAQTCGTRPGLHRFAVLQENVAWGNGRVSVTRVITVQVANFTLRLEQRQWKVTVNGVDMKLPVVLANGQIRASQHGSDVVIETDFGLRVAYDLVYYVRVTVPGNYYQLMCGLCGNYNGDPKDDFQKPNGSQAGNANEFGNSWEEVVPDSPCLPPPTCPPGSEGCIPSEECPPELEKKYQKEEFCGLLSSPTGPLSSCHKLVDPQGPLKDCIFDLCLGGGNLSILCSNIHAYVSACQAAGGHVEPWRNETFCPMECPQNSHYELCADTCSLGCSALSAPLQCPDGCAEGCQCDSGFLYNGQACVPIQQCGCYHNGAYYEPEQTVLIDNCRQQCTCHAGKVVVCQEHSCKPGQVCQPSGGILSCVTKDPCHGVTCRPQETCKEQGGQGVCLPNYEATCWLWGDPHYHSFDGRKFDFQGTCNYVLATTGCPGVSTQGLTPFTVTTKNQNRGNPAVSYVRVVTVAALGTNISIHKDEIGKVRVNGVLTALPVSVADGRISVAQGASKALLVADFGLQVSYDWNWRVDVTLPSSYHGAVCGLCGNMDRNPNNDQVFPNGTLAPSIPIWGGSWRAPGWDPLCWDECRGSCPTCPEDRLEQYEGPGFCGPLAPGTGGPFTTCHAHVPPESFFKGCVLDVCMGGGDHDILCKALASYVAACQAAGVVIEDWRAQVGCEITCPENSHYEVCGPPCPASCPSPAPLTTPAVCEGPCVEGCQCDAGFVLSADRCVPLNNGCGCWANGTYHEAGSEFWADGTCSQWCRCGPGGGSLVCTPASCGLGEVCGLLPSGQHGCQPVSTAECQAWGDPHYVTLDGHRFDFQGTCEYLLSAPCHGPPLGAENFTVTVANEHRGSQAVSYTRSVTLQIYNHSLTLSARWPRKLQVDGVFVTLPFQLDSLLHAHLSGADVVVTTTSGLSLAFDGDSFVRLRVPAAYAGSLCGLCGNYNQDPADDLKAVGGKPAGWQVGGAQGCGECVSKPCPSPCTPEQQESFGGPDACGVISATDGPLAPCHGLVPPAQYFQGCLLDACQVQGHPGGLCPAVATYVAACQAAGAQLREWRRPDFCPFQCPAHSHYELCGDSCPGSCPSLSAPEGCESACREGCVCDAGFVLSGDTCVPVGQCGCLHDDRYYPLGQTFYPGPGCDSLCRCREGGEVSCEPSSCGPHETCRPSGGSLGCVAVGSTTCQASGDPHYTTFDGRRFDFMGTCVYVLAQTCGTRPGLHRFAVLQENVAWGNGRVSVTRVITVQVANFTLRLEQRQWKVTVNGVDMKLPVVLANGQIRASQHGSDVVIETDFGLRVAYDLVYYVRVTVPGNYYQLMCGLCGNYNGDPKDDFQKPNGSQAGNANEFGNSWEEVVPDSPCLPPPTCPPGSEGCIPSEECPPELEKKYQKEEFCGLLSSPTGPLSSCHKLVDPQGPLKDCIFDLCLGGGNLSILCSNIHAYVSACQAAGGHVEPWRNETFCPMECPQNSHYELCADTCSLGCSALSAPLQCPDGCAEGCQCDSGFLYNGQACVPIQQCGCYHNGVYYEPEQTVLIDNCRQQCTCHVGKVVVCQEHSCKPGQVCQPSGGILSCVNKDPCHGVTCRPQETCKEQGGQGVCLPNYEATCWLWGDPHYHSFDGRKFDFQGTCNYVLATTGCPGVSTQGLTPFTVTTKNQNRGNPAVSYVRVVTVAALGTNISIHKDEIGKVRVNGVLTALPVSVADGRISVAQGASKALLVADFGLQVSYDWNWRVDVTLPSSYHGAVCGLCGNMDRNPNNDQVFPNGTLAPSIPIWGGSWRAPGWDPLCWDECRGSCPTCPEDRLEQYEGPGFCGPLASGTGGPFTTCHAHVPPESFFKGCVLDVCMGGGDHDILCKALASYVAACQAAGVVIEDWRAQVGCEITCPENSHYEVCGPPCPASCPSPAPLTTPAVCEGPCVEGCQCDAGFVLSADRCVPLNNGCGCWANGTYHEAGSEFWADGTCSQWCRCGPGGGSLVCTPASCGLGEVCGLLPSGQHSCQPVSTAECQAWGDPHYVTLDGHRFDFQGTCEYLLSAPCHGPPLGAENFTVTVANEHRGSQAVSYTRSVTLQIYNHSLTLSARWPRKLQVDGVFVALPFQLDSLLHAHLSGADVVVTTTSGLSLAFDGDSFVRLRVPAAYAASLCGLCGNYNQDPADDLKAVGGKPAGWQVGGAQGCGECVSKPCPSPCTPEQQESFGGPDACGVISATDGPLAPCHGLVPPAQYFQGCLLDACQVQGHPGGLCPAVATYVAACQAAGAQLGEWRRPDFCPLQCPAHSHYELCGDSCPVSCPSLSAPEGCESACREGCVCDAGFVLSGDTCVPVGQCGCLHDGRYYPLGEVFYPGPECERRCECGPGGHVTCQEGAACGPHEECRLEDGVQACHATGCGRCLANGGIHYITLDGRVYDLHGSCSYVLAQVCHPKPGDEDFSIVLEKNAAGHLQRLLVTVAGQVVSLAQGQQVTVDGEAVALPVAVGRVRVTAEGRNMVLQTTKGLRLLFDGDAHLLMSIPSPFRGRLCGLCGNFNGNWSDDFVLPNGSAASSVETFGAAWRVPGSSKGCGEGCGPQGCPVCLAEETAPYESNEACGQLRNPQGPFATCQAVLSPSEYFRQCVYDLCAQKGDKAFLCRSLAAYTAACQAAGVAVKPWRTDSFCPLHCPAHSHYSICTRTCQGSCAALSGLTGCTTRCFEGCECDDRFLLSQGVCIPVQDCGCTHNGRYLPVNSSLLTSDCSERCSCSSSSGLTCQAAGCPPGRVCEVKAEARNCWATRGLCVLSVGANLTTFDGARGATTSPGVYELSSRCPGLQNTIPWYRVVAEVQICHGKTEAVGQVHIFFQDGMVTLTPNKGVWVNGLRVDLPAEKLASVSVSRTPDGSLLVRQKAGVQVWLGANGKVAVIVSNDHAGKLCGACGNFDGDQTNDWHDSQEKPAMEKWRAQDFSPCYG

SEQ ID NO: 1117 - protein, 806 aa, Homo sapiens
MASGADSKGDDLSTAILKQKNRPNRLIVDEAINEDNSVVSLSQPKMDELQLFRGDTVLLKGKKRREAVCIVLSDDTCSDEKIRMNRVVRNNLRVRLGDVISIQPCPDVKYGKRIHVLPIDDTVEGITGNLFEVYLKPYFLEAYRPIRKGDIFLVRGGMRAVEFKVVETDPSPYCIVAPDTVIHCEGEPIKREDEEESLNEVGYDDVGGCRKQLAQIKEMVELPLRHPALFKAIGVKPPRGILLYGPPGTGKTLIARAVANETGAFFFLINGPEIMSKLAGESESNLRKAFEEAEKNAPAIIFIDELDAIAPKREKTHGEVERRIVSQLLTLMDGLKQRAHVIVMAATNRPNSIDPALRRFGRFDREVDIGIPDATGRLEILQIHTKNMKLADDVDLEQVANETHGHVGADLAALCSEAALQAIRKKMDLIDLEDETIDAEVMNSLAVTMDDFRWALSQSNPSALRETVVEVPQVTWEDIGGLEDVKRELQELVQYPVEHPDKFLKFGMTPSKGVLFYGPPGCGKTLLAKAIANECQANFISIKGPELLTMWFGESEANVREIFDKARQAAPCVLFFDELDSIAKARGGNIGDGGGAADRVINQILTEMDGMSTKKNVFIIGATNRPDIIDPAILRPGRLDQLIYIPLPDEKSRVAILKANLRKSPVAKDVDLEFLAKMTNGFSGADLTEICQRACKLAIRESIESEIRRERERQTNPSAMEVEEDDPVPEIRRDHFEEAMRFARRSVSDNDIRKYEMFAQTLQQSRGFGSFRFPSGNQGGAGPSQGSGGGTGGSVYTEDNDDDLYG

SEQ ID NO: 1118 - protein, 806 aa, Homo sapiens
MASGADSKGDDLSTAILKQKNRPNRLIVDEAINEDNSVVSLSQPKMDELQLFRGDTVLLKGKKRREAVCIVLSDDTCSDEKIRMNRVVRNNLRVRLGDVISIQPCPDVKYGKRIHVLPIDDTVEGITGNLFEVYLKPYFLEAYRPIRKGDIFLVRGGMRAVEFKVVETDPSPYCIVAPDTVIHCEGEPIKREDEEESLNEVGYDDIGGCRKQLAQIKEMVELPLRHPALFKAIGVKPPRGILLYGPPGTGKTLIARAVANETGAFFFLINGPEIMSKLAGESESNLRKAFEEAEKNAPAIIFIDELDAIAPKREKTHGEVERRIVSQLLTLMDGLKQRAHVIVMAATNRPNSIDPALRRFGRFDREVDIGIPDATGRLEILQIHTKNMKLADDVDLEQVANETHGHVGADLAALCSEAALQAIRKKMDLIDLEDETIDAEVMNSLAVTMDDFRWALSQSNPSALRETVVEVPQVTWEDIGGLEDVKRELQELVQYPVEHPDKFLKFGMTPSKGVLFYGPPGCGKTLLAKAIANECQANFISIKGPELLTMWFGESEANVREIFDKARQAAPCVLFFDELDSIAKARGGNIGDGGGAADRVINQILTEMDGMSTKKNVFIIGATNRPDIIDPAILRPGRLDQLIYIPLPDEKSRVAILKANLRKSPVAKDVDLEFLAKMTNGFSGADLTEICQRACKLAIRESIESEIRRERERQTNPSAMEVEEDDPVPEIRRDHFEEAMRFARRSVSDNDIRKYEMFAQTLQQSRGFGSFRFPSGNQGGAGPSQGSGGGTGGSVYTEDNDDDLYG

SEQ ID NO: 1119 - DNA, 1341 bp, Homo sapiens
atgtcctgcggtaacgccaagatcaactctcccgcgccgtccttcgaggaggtggcgctcatgcccaacggcagcttcaagaagatcagcctctcctcctacaagggcaagtgggtcgtgctcttcttctacccgctcgacttcaccttcgtgtgcccgacagaggtcatcgcgttctccgacagcgtgagtcgcttcaacgagctcaactgcgaggtcctcgcgtgctcgatagacagcgagtacgcgcacctgcagtggacgctgcaggaccgcaagaagggcggcctcgggaccatggcgatcccaatgctagccgacaagaccaagagcatcgctcgttcctacggcgtgctggaggagagccagggcgtggcctaccgcggtctcttcatcatcgacccccatggcatgctgcgtcagatcaccgtcaatgacatgccggtgggccgcagcgtggaggaggttctacgcctgctggaggcttttcagttcgtggagaagcacggcgaggtgtgccccgcgaactggaagaagggcgcccccacgatgaagccggaaccgaatgcgtctgtcgagggatacttcagcaagcagtctagagaattcatggcaggtgtgagtgcctgtataaaatattctatgtttaccttcaacttcttgttctggctatgtggtatcttgatcctagcattagcaatatgggtacgagtaagcaatgactctcaagcaatttttggttctgaagatgtaggctctagctcctacgttgctgtggacatattgattgctgtaggtgccatcatcatgattctgggcttcctgggatgctgcggtgctataaaagaaagtcgctgcatgcttctgttgtttttcataggcttgcttctgatcctgctcctgcaggtggcgacaggtatcctaggagctgttttcaaatctaagtctgatcgcattgtgaatgaaactctctatgaaaacacaaagcttttgagcgccacaggggaaagtgaaaaacaattccaggaagccataattgtgtttcaagaagagtttaaatgctgcggtttggtcaatggagctgctgattggggaaataattttcaacactatcctgaattatgtgcctgtctagataagcagagaccatgccaaagctataatggaaaacaagtttacaaagagacctgtatttctttcataaaagacttcttggcaaaaaatttgattatagttattggaatatcatttggactggcagttattgagatactgggtttggtgttttctatggtcctgtattgccagatcgggaacaaacaccatcaccatcaccattga

SEQ ID NO: 1120 - DNA, 732 bp, Homo sapiens
atggcaggtgtgagtgcctgtataaaatattctatgtttaccttcaacttcttgttctggctatgtggtatcttgatcctagcattagcaatatgggtacgagtaagcaatgactctcaagcaatttttggttctgaagatgtaggctctagctcctacgttgctgtggacatattgattgctgtaggtgccatcatcatgattctgggcttcctgggatgctgcggtgctataaaagaaagtcgctgcatgcttctgttgtttttcataggcttgcttctgatcctgctcctgcaggtggcgacaggtatcctaggagctgttttcaaatctaagtctgatcgcattgtgaatgaaactctctatgaaaacacaaagcttttgagcgccacaggggaaagtgaaaaacaattccaggaagccataattgtgtttcaagaagagtttaaatgctgcggtttggtcaatggagctgctgattggggaaataattttcaacactatcctgaattatgtgcctgtctagataagcagagaccatgccaaagctataatggaaaacaagtttacaaagagacctgtatttctttcataaaagacttcttggcaaaaaatttgattatagttattggaatatcatttggactggcagttattgagatactgggtttggtgttttctatggtcctgtattgccagatcgggaacaaacaccatcaccatcaccattga

SEQ ID NO: 1121 - protein, 446 aa, Homo sapiens
MSCGNAKINSPAPSFEEVALMPNGSFKKISLSSYKGKWVVLFFYPLDFTFVCPTEVIAFSDSVSRFNELNCEVLACSIDSEYAHLQWTLQDRKKGGLGTMAIPMLADKTKSIARSYGVLEESQGVAYRGLFIIDPHGMLRQITVNDMPVGRSVEEVLRLLEAFQFVEKHGEVCPANWKKGAPTMKPEPNASVEGYFSKQSREFMAGVSACIKYSMFTFNFLFWLCGILILALAIWVRVSNDSQAIFGSEDVGSSSYVAVDILIAVGAIIMILGFLGCCGAIKESRCMLLLFFIGLLLILLLQVATGILGAVFKSKSDRIVNETLYENTKLLSATGESEKQFQEAIIVFQEEFKCCGLVNGAADWGNNFQHYPELCACLDKQRPCQSYNGKQVYKETCISFIKDFLAKNLIIVIGISFGLAVIEILGLVFSMVLYCQIGNKHHHHHH

SEQ ID NO: 1122 - protein, 243 aa, Homo sapiens
MAGVSACIKYSMFTFNFLFWLCGILILALAIWVRVSNDSQAIFGSEDVGSSSYVAVDILIAVGAIIMILGFLGCCGAIKESRCMLLLFFIGLLLILLLQVATGILGAVFKSKSDRIVNETLYENTKLLSATGESEKQFQEAIIVFQEEFKCCGLVNGAADWGNNFQHYPELCACLDKQRPCQSYNGKQVYKETCISFIKDFLAKNLIIVIGISFGLAVIEILGLVFSMVLYCQIGNKHHHHHH

SEQ ID NO: 1123 - DNA, 35 bp, Artificial Sequence
  PCR primer
ggagctagcgccgccatggcaggtgtgagtgcctg

SEQ ID NO: 1124 - DNA, 54 bp, Artificial Sequence
  PCR primer
gccggatcctcaatggtgatggtgatggtgtttgttcccgatctggcaatacag

SEQ ID NO: 1125 - DNA, 3919 bp, Homo sapiens
gggcagagcgtcagcaagagtacagagagaaactccaagggctgtgtgatctcctcacccagactgaaaaccgcctaattagtaaccaggaagcctttgtgattggagacggcacggtggagttacagaagtaccagtccaagcaagaggaattacagagagatatgcaaggaagtacacaggcaatggaagaaatagtgcgaaacacagaactctttttaaaagagagcggtgacgagttgtcccaagcggatagagctttgattgagcagaaactgaacgaggtgaagatgaagtgtgcgcagctgaacttaaaggctgagcagtcgagaaaggagttggataaggcagtgactacggccctcaaggaggagactgaaaaggttgcagctgtgaggcagctggaagagagcaaaaccaagatagaaaatcttttgaactggctgtcaaatgttgaggaagactccgaaggggtgtggacgaagcacacacaacccatggagcagaacggaacctatttgcatgaaggtgatagcaagttaggagctggcgaagaggatgaagtcaatggtaacctgctggagacagatgctgaagggcacagtgaggccacgaaggggaatctgaaccagcagtatgagaaagtcaaggcccagcacggaaagatcatggctcagcaccaggcggtcctcctagccacgcagtcggcccaggtgctgcttgagaaacagggccactatctgtcccccgaggagaaggagaagctgcagaagaacacgcaggagctgaaggtgcattacgagaaggtgctggccgagtgcgagaagaaggtgaagctgacgcactccctgcaggaggagctggagaagtttgacaccgactacagcgagtttgagcactggctacagcagtccgagcaagaactggcgaacctggaggcaggtgcggacgacctcagcgggctcatggacaagctgacgaggcagaagagcttctcagaggacgtcatttctcacaaaggcgacttgaggtacatcaccatttccggaaacagggtgatagacgctgccaagtcttgcagcaagagagacagtgacaggatcggcaaggacagcgtcgagacttccgcaacccacagagaagttcagaccaaactggaccaggttacagaccgcttcaggtctctctactctaagtgcagtgttcttggaaataacctcaaagacctggtggatcaataccagcagtatgaagatgcttcctgcggccttctctccgggctccaggcctgcgaggccaaagccagcaaacatttacgggagcccattgctttggaccccaaaaatctgcaaaggcagctggaagagaccaaggctttgcaaggacagatatcaagtcagcaggttgctgtagagaagctgaagaaaaccgcagaggtactcttggatgccaagggctcgctgcttcctgccaagaatgacatccagaagacgcttgatgacattgtcgggagatacgatgatctgtccaagtgtgtgaacgaacggaatgaaaagctccagatcactctgacccgctccctgagtgtgcaggacgctttggatgagatgctggactggatgggaagtgtggaaagctccctggtcaagccaggtcaagtgccactaaactccacagcgctccaggatctcatcagtaaagacaccatgctggagcaggatattacgggtcgtcaaagcagcataaatgccatgaacgaaaaggtgaagacatttatagagacgacagacccgtccacagcctcctccctgcaagcgaaaatgaaggatctgtctgctcgcttttccgaagcaagtcagaaacacaaggaaaagctagccaagatggtggagctaaaggccaaagtagagcagtttgagaagctctcagacaagctccagacgtttctagagacacagagccaggcgctcaccgaggtggccatgccaggaaaggatgttccggagctgtctcagcatatgcaggaatcaactgctaaattcttagaacacaggaaagatctcgaagctttgcacagcctcctgaaagagatatccagccatggcttaccaggggacaaagctctggtgtttgagaaaactaataacttgtcaaggaaattcaaagaaatggaggatactatccaagaaaagaaagacgctctaagttcttgtcaggagcagctgagtgcttttcaaaccctcgctcagtcactgaaaacatggataaaagagacaaccaagcaggttcccgttgtgaagccttctcttggcacagaggacttgagaaaatctctggaagaaaccaagaaattacaagaaaagtggaatctgaaagcaccagaaattcacaaagcaaacaacagtggtgtctcactatgtaacctgctgagtgcattgatcagccctgcaaaggccatagccgcagccaaatcaggtggagtaatactaaatggtgaaggaacagacacaaatactcaggtttcttggcaaataaaggtttaacatctattaagaaggacatgactgacataagccacagttacgaagacctgggcctcttactcaaggataaaatagttgaactgaacactaagctctccaaattgcaaaaggctcaggaagagtccagtgcaatgatgcagtggttagagaagatgaacaagacggccagcaggtggcccccgccacctacacctgcagacactgagtctgtgaagttgcaggtggagcagaacaagtcatttgaggcagaactgaagcaaaatgtaaacaaagtgcaagaattaaaagacaaactatcagagcttctggaagagaacccagaggctcccgaggcccagtcctggaagcaggcactggcagagatggacactaagtggcaagagctcaaccagttgaccatggacaggcaacaaaagctggaagagtcctccaataatctaacccagttccagaccacagaggcccagttaaaacagtggctcatggagaaggagctgatggtcagcgtgctcggccccttgtccattgacccaaacaaaacacaacagaaaataacaagtatgggtgaagacatagagaactcggagtgctgtgcagcatgattggtaagaatgtaaaatggtgcaacctttgtggaaagcagcagggcgcaaattgaaaaagacagaggcaaatcctcgtgccgaattcggcacgaggccagttatattatcccattcattagaaattaccagtgtaactaaacataaatattccagtttagagtgcttaaacgtagctatctttcttaaggccaggagggtaactttgtggtatctaaagggcttaaatttcagaatgcagaataaattgcctttttaaaaccaagcattttgtacaagcccttattttcagttttttaactaccaaataggtgtgatgtactttagaagtaaacaaagatgttcacccatgataatggatgttaaagctcctgcagttgttcttttcgtgtttaaagggtatattctaatagtggaagcatcaaacatgtcagtgatttcatctcattcagaaataaagagattaatattggtctttattttttggcattttaagttttatataaatggatgcagatggagattatcacccacaaatatatttaaatggatttttcttaatttgaatttcaagtaatctttttatttcaagtaattagttacgcatttagttacattgccagttttttttttatcaatttcagtaagacaaaatatactaaaatgtttaaatagcctcattcaatcttacattttgacatttcagcaatcattctggcttacagtaattagatcccctgttacgacacatgccctttgttcttaataactagc

SEQ ID NO: 1126 - protein, 194 aa, Homo sapiens
MTDISHSYEDLGLLLKDKIVELNTKLSKLQKAQEESSAMMQWLEKMNKTASRWPPPPTPADTESVKLQVEQNKSFEAELKQNVNKVQELKDKLSELLEENPEAPEAQSWKQALAEMDTKWQELNQLTMDRQQKLEESSNNLTQFQTTEAQLKQWLMEKELMVSVLGPLSIDPNKTQQKITSMGEDIENSECCAA

SEQ ID NO: 1127 - protein, 792 aa, Homo sapiens
MQGSTQAMEEIVRNTELFLKESGDELSQADRALIEQKLNEVKMKCAQLNLKAEQSRKELDKAVTTALKEETEKVAAVRQLEESKTKIENLLNWLSNVEEDSEGVWTKHTQPMEQNGTYLHEGDSKLGAGEEDEVNGNLLETDAEGHSEATKGNLNQQYEKVKAQHGKIMAQHQAVLLATQSAQVLLEKQGHYLSPEEKEKLQKNTQELKVHYEKVLAECEKKVKLTHSLQEELEKFDTDYSEFEHWLQQSEQELANLEAGADDLSGLMDKLTRQKSFSEDVISHKGDLRYITISGNRVIDAAKSCSKRDSDRIGKDSVETSATHREVQTKLDQVTDRFRSLYSKCSVLGNNLKDLVDQYQQYEDASCGLLSGLQACEAKASKHLREPIALDPKNLQRQLEETKALQGQISSQQVAVEKLKKTAEVLLDAKGSLLPAKNDIQKTLDDIVGRYDDLSKCVNERNEKLQITLTRSLSVQDALDEMLDWMGSVESSLVKPGQVPLNSTALQDLISKDTMLEQDITGRQSSINAMNEKVKTFIETTDPSTASSLQAKMKDLSARFSEASQKHKEKLAKMVELKAKVEQFEKLSDKLQTFLETQSQALTEVAMPGKDVPELSQHMQESTAKFLEHRKDLEALHSLLKEISSHGLPGDKALVFEKTNNLSRKFKEMEDTIQEKKDALSSCQEQLSAFQTLAQSLKTWIKETTKQVPVVKPSLGTEDLRKSLEETKKLQEKWNLKAPEIHKANNSGVSLCNLLSALISPAKAIAAAKSGGVILNGEGTDTNTQVSWQIKV

SEQ ID NO: 1128 - protein, 80 aa, Homo sapiens
MVQPLWKAAGRKLKKTEANPRAEFGTRPVILSHSLEITSVTKHKYSSLECLNVAIFLKARRVTLWYLKGLNFRMQNKLPF

SEQ ID NO: 1129 - protein, 86 aa, Homo sapiens
MYFRSKQRCSPMIMDVKAPAVVLFVFKGYILIVEASNMSVISSHSEIKRLILVFIFWHFKFYINGCRWRLSPTNIFKWIFLNLNFK
